(19) United States
(12) Patent Application Publication
(10) Pub. No.: US 2020/0260698 A1
(43) Pub. Date: Aug. 20, 2020

(54) EXON DELETION CORRECTION OF DUCHENNE MUSCULAR DYSTROPHY MUTATIONS IN THE DYSTROPHIN ACTIN BINDING DOMAIN 1 USING CRISPR GENOME EDITING

(71) Applicant: The Board of Regents of the University of Texas System, Austin, TX (US)

(72) Inventors: Viktoriia KYRYCHENKO, Dallas, TX (US); Eric N. OLSON, University Park, TX (US); Rhonda BASSEL-DUBY, Dallas, TX (US)

(73) Assignee: The Board of Regents of the University of Texas System, Austin, TX (US)

(21) Appl. No.: 16/639,828

(22) PCT Filed: Aug. 17, 2018
(86) PCT No.: PCT/US2018/046884

§ 371 Date: Feb. 18, 2020

Related U.S. Application Data
(60) Provisional application No. 62/547,590, filed on Aug. 18, 2017.

(51) Int. Cl. A01K 67/027; C12N 15/10; C12N 15/113; A61P 21/00

(52) U.S. Cl. CPC A01K 67/0276; C12N 15/102; C12N 15/113; A61P 21/00; A01K 2217/075; C12N 2330/51; A01K 2267/0306; C12N 2310/20; C12N 2320/32; C12N 2320/33; A01K 2227/105

(57) ABSTRACT

CRISPR/Cas9-mediated genome editing holds clinical potential for treating genetic diseases, such as Duchenne muscular dystrophy (DMD), which is caused by mutations in the dystrophin gene and absence or deficiency of dystrophin protein in striated muscle. Provided herein are compositions and methods for treating DMD caused by mutations in the dystrophin Actin Binding Domain 1 (ABD-1). The compositions and method described herein can be used to remove mutant sequences in dystrophin ABD-1 to generate a corrected DMD protein that, while lacking one or more exons (e.g., exons 3-9), retains important functional properties.

### PRIORITY CLAIM

[0001] The present application claims benefit of priority to U.S. Provisional Application Ser. No. 62/547,590, filed on Aug. 18, 2017, the entire contents of which are hereby incorporated by reference in their entireties.

### FEDERAL FUNDING SUPPORT CLAUSE

[0002] This invention was made with government support under grant no. U54 HD 087351 awarded by National Institutes of Health. The government has certain rights in the invention.

### SEQUENCE LISTING

[0003] The instant application contains a sequence listing which has been submitted electronically in ASCII format and is hereby incorporated by reference in its entirety. Said ASCII copy, created on Aug. 16, 2018, is named EXON_008_01WO_SeqList_ST25.txt and is 1 MB in size.

### FIELD OF THE DISCLOSURE

[0004] The present disclosure relates to the fields of molecular biology, medicine and genetics. More particularly, the disclosure relates to the use of genome editing to correct mutations in actin binding domain 1 of the DMD gene using an exon-deletion approach.

### BACKGROUND

[0005] Dystrophin is a large intracellular protein that stabilizes muscle membranes against forces associated with contraction and stretch by providing a mechanical link between the intracellular actin cytoskeleton and the transmembrane dystroglycan complex. The DMD gene, one of the largest human genes, encodes dystrophin and is comprised of 79 exons on the Xp21 chromosome. Mutations that disrupt the open reading frame of dystrophin lead to Duchenne muscular dystrophy (DMD), a life-limiting, rapidly progressive form of muscular dystrophy. DMD is a X-linked recessive disorder affecting 1:5,000 boys. Loss of dystrophin destabilizes muscle membranes, allowing excess calcium into cardiac and skeletal muscle cells, resulting in muscle degeneration and necrosis. Internal deletion mutations in the dystrophin gene (DMD) that preserve the amino- and carboxyl-termini of the protein but eliminate various internal rod domains cause Becker muscular dystrophy (BMD), a relatively mild muscle disease.

[0006] There remains a need in the art for compositions and methods for treating DMD.

### SUMMARY

[0007] Thus, in accordance with the present disclosure, there is provided a composition comprising a sequence encoding a first DMD guide RNA (gRNA) targeting a first genomic target sequence; a sequence encoding a second DMD gRNA targeting a second genomic target sequence; a sequence encoding a first promoter, wherein the first promoter drives expression of the sequence encoding the first DMD gRNA; and a sequence encoding a second promoter, wherein the second promoter drives expression of the sequence encoding the second DMD gRNA; wherein the first genomic target sequence is in any one of introns 2-9 of the dystrophin gene; wherein the second genomic target sequence is in any one of introns 2-9 of the dystrophin gene. In some embodiments, the first genomic target sequence is in intron 2 and the second genomic target sequence is in intron 7 of the dystrophin gene. In some embodiments, the first genomic target sequence is in intron 5 and the second genomic target sequence is in intron 7 of the dystrophin gene. In some embodiments, the first genomic target sequence is in intron 2 and the second genomic target sequence is in intron 9 of the dystrophin gene. In some embodiments, the first genomic target sequence is in intron 7 and the second genomic target sequence is in intron 9 of the dystrophin gene. In some embodiments, the first genomic target sequence is located 5′ from a wildtype exon, and the second genomic target sequence is located 3′ from the wildtype exon. The wildtype exon may be exon 2, 3, 4, 5, 6, 7, 8 or 9 of dystrophin. In some embodiments, the first genomic target sequence is located 5′ from an exon comprising a mutation, and the second genomic target sequence is located 3′ from the exon comprising a mutation. The exon comprising a mutation may be exon 2, 3, 4, 5, 6, 7, 8 or 9 of dystrophin. In some embodiments, the sequence encoding the first DMD gRNA and the sequence encoding the second DMD gRNA are identical. In some embodiments, the sequence encoding the first DMD gRNA and the sequence encoding the second DMD gRNA are not identical. In some embodiments, the sequence encoding the first DMD guide RNA is any one of SEQ ID NO: 1 to 5. In some embodiments, the sequence encoding the second DMD guide RNA is any one of SEQ ID NO: 1 to 5. In some embodiments, the sequence of the first DMD guide RNA is any one of SEQ ID NO: 6 to 10. In some embodiments, the sequence of the second DMD guide RNA is any one of SEQ ID NO: 6 to 10. In some embodiments, the sequence encoding the first promoter and the sequence encoding the second promoter are identical. In some embodiments, the sequence encoding the first promoter and the sequence encoding the second promoter are not identical. In some embodiments, at least one of the first promoter and the second promoter is a constitutive promoter. In some embodiments, at least one of the first promoter and the second promoter is an inducible promoter. In some embodiments, at least one of the first promoter and the second promoter is a muscle-specific promoter. In some embodiments, at least one of the first promoter and the second promoter is CK8. In some embodiments, at least one of the first promoter and the second promoter is CK8e. In some embodiments, at least one of the first promoter and the second promoter is selected from the group consisting of the U6 promoter, the H1 promoter, and the 7SK promoter. In some embodiments, a first vector comprises the sequence encoding the first DMD gRNA and the first promoter, and a second vector comprises the sequence encoding the second DMD gRNA and the second promoter. In some embodiments, at least one of the first vector and the second vector is a non-viral vector. In some embodiments, the non-viral vector is a plasmid. In some embodiments, a liposome or nanoparticle comprises the non-viral vector. In some embodiments, at least one of the first vector and the second vector is a viral vector. In some embodiments, the viral vector is an adeno-associated viral (AAV) vector. In some embodiments, the AAV vector is replication-defective or conditionally replication defective. In some embodiments, the AAV vector is a recombinant AAV vector. In some embodiments, the AAV vector comprises a sequence isolated or derived from an AAV vector of serotype AAV1, AAV2, AAV3, AAV4, AAV5, AAV6, AAV7, AAV8, AAV9, AAV10, AAV11, AAVRh.74 or any combination thereof. In some embodiments, a first vector comprises the sequence encoding the first DMD gRNA, the sequence encoding the second DMD gRNA, the sequence encoding the first promoter, and the sequence encoding the second promoter. In some embodiments, the composition further comprises a sequence encoding a nuclease, such as Cas9. In some embodiments, the sequence encoding the Cas9 is isolated or derived from S. aureus. In some embodiments, the composition comprises a pharmaceutically-acceptable carrier.

[0008] Also provided is a cell comprising a composition of the disclosure. The cell may be a mammalian cell, such as a murine cell or a human cell. In some embodiments, the cell is an oocyte (e.g., a non-human oocyte). Also provided are compositions comprising a cell of the disclosure, and a genetically engineered mouse comprising a cell of the disclosure.

[0009] Also provided is a method of treating a subject in need thereof, the method comprising administering to the subject a therapeutically effective amount of a composition of the disclosure. In some embodiments, the composition is administered systemically. In some embodiments, the composition is administered by an intravenous infusion or injection. In some embodiments, the composition is administered locally. In some embodiments, the composition is administered directly to a muscle tissue, such as a tibialis anterior tissue, a quadriceps tissue, a soleus tissue, a diaphragm tissue, or a heart tissue. In some embodiments, the composition is administered by an intramuscular infusion or injection. In some embodiments, the composition is administered by intra-cardiac injection. In some embodiments, the subject is a neonate, an infant, a child, a young adult, or an adult. In some embodiments, the subject has muscular dystrophy. In some embodiments, the subject is a genetic carrier for muscular dystrophy. In some embodiments, the subject is male. In some embodiments, the subject is female. In some embodiments, the subject is less than 10 years old, less than 5 years old, or less than 2 years old.

[0010] Also provided herein is the use of the composition of the disclosure in the manufacture of a medicament for the treatment of muscular dystrophy.

[0011] Also provided herein is a genetically engineered mouse whose genome comprises a deletion of exon 8 and 9 of the dystrophin gene resulting in an out of frame shift and a premature stop codon in exon 10.

[0012] Also provided herein is a genetically engineered mouse produced by a method comprising the steps of: (a) contacting a fertilized oocyte with (i) a Cas9, a first gRNA, and a second gRNA, or (ii) one or more sequences encoding the same, thereby creating a modified oocyte, wherein the first gRNA targets an intron located 5′ to exon 8 of the dystrophin gene, wherein the second gRNA targets an intron located 3′ to exon 9 of the dystrophin gene, wherein the contacting causes exons 8 and 9 to be deleted in the modified oocyte, wherein deletion of exons 8 and 9 results in an out of frame shift and a premature stop codon in exon 10; and (b) transferring the modified oocyte into a recipient female. The disclosure also provides a mouse produced by this method.

[0013] In some embodiments, the disclosure provides a method of editing an Actin Binding Domain 1 (ABD-1) dystrophin gene defect in a subject comprising contacting a cell with one or more expression constructs expressing Cas9, a first guide RNA and a second guide RNA, wherein the first guide RNA targets a dystrophin intron 5′ to the gene defect, and the second guide RNA targets a dystrophin intron 3′ to the gene defect, thereby resulting in an edited dystrophin gene lacking dystrophin exons 3-9. The cell may be a muscle cell, a satellite cell, or an iPSC/iPSC-derived CM. In some embodiments, the Cas9 expression construct is distinct from the expression construct that expresses the first and/or second guide RNAs. In some embodiments, the Cas9 expression construct is the same expression construct as that expressing the first and/or second guide RNAs. In some embodiments, the expression construct(s) is/are a viral vector. In some embodiments, the expression construct(s) is/are a non-viral vector. In some embodiments, the expression construct(s) is/are naked plasmid DNA or chemically-modified mRNA. In some embodiments, (a) the first guide RNA targets dystrophin intron 2 and the second guide RNA targets dystrophin intron 9; (b) the first guide RNA targets dystrophin intron 2, and the second guide RNA targets dystrophin intron 7; (c) the first guide RNA targets dystrophin intron 7, and the second guide RNA targets dystrophin intron 9. In some embodiments, the expression construct(s) is/are provided to the cell in one or more nanoparticles. In some embodiments, the viral vector is an AAV vector, such as AAV-9. In some embodiments, the contacting comprises administration of AAV vector to the subject, such as by intra-muscular, intra-peritoneal (IP), retro-orbital (RO), or intra-cardiac injection. In some embodiments, the expression construct(s) is/are delivered to and iPSC/iPSC-derived CM or directly to a muscle tissue, such as tibialis anterior, quadriceps, soleus, diaphragm or heart. In some embodiments, the expression construct(s) is/are delivered systemically. In some embodiments, the subject exhibits normal dystrophin-positive myofibers and/or mosaic dystrophin-positive myofibers containing centralized nuclei. In some embodiments, the subject exhibits a decreased serum CK level as compared to a serum CK level prior to contacting. In some embodiments, the subject exhibits improved grip strength as compared to a serum CK level prior to contacting. In some embodiments, the first guide RNA is encoded by the DNA sequence 5′-AATTAATCTGCCGAAGATGA-3′ (SEQ ID NO: 1). In some embodiments, the second guide RNA is encoded by the DNA sequence 5′-AAACAAACCAGCTCTTCACG-3′ (SEQ ID NO: 5). In some embodiments, the expression construct(s) is/are delivered to a human iPS cell by nucleofection. In some embodiments, the method comprises further comprising identifying an ABD-1 target based on reference to a Duchenne mutation database. In some embodiments, the first and second guide RNAs are encoded by and expressed from the same expression construct, or from distinct expression constructs. In some embodiments, one or more promoters in the expression construct(s) is/are RNA polymerase III promoters. In some embodiments, the mutant dystrophin exon is exon 3, 4, 5, 6, 7, 8 or 9.

[0014] Other objects, features and advantages of the present disclosure will become apparent from the following detailed description. It should be understood, however, that the detailed description and the specific examples, while indicating preferred embodiments, are given by way of illustration only, since various changes and modifications within the spirit and scope of the disclosure will become apparent to those skilled in the art from this detailed description.

### BRIEF DESCRIPTION OF THE DRAWINGS

[0015] The following drawings form part of the present specification and are included to further demonstrate certain aspects of the present disclosure. The disclosure may be better understood by reference to one or more of these drawings in combination with the detailed description of specific embodiments presented herein.

[0016] FIG. 1A-F. Generating an iDMD model by deleting DMD exons 8-9 using CRISPR/Cas9-mediated genome editing. (FIG. 1A) Strategy showing CRISPR/Cas9-mediated genomic editing of wild type (WT) DMD to generate ΔEx8-9 iDMD. Shape and color of boxes denoting DMD exons indicate reading frame and protein coding domains. Yellow designates actin binding domain-1 (ABD-1). Blue marks part of the central rod domain. Red lines indicate actin binding sites (ABS1, ABS2 and ABS3). Arrowheads mark targeting site of guide RNAs (gRNAs). Stop sign marks exon with stop codon. (FIG. 1B) Sequences of gRNAs (SEQ ID NO: 93, SEQ ID NO: 5) and their targeting sites within intron 7 (top, SEQ ID NO: 94-45) and intron 9 (bottom, SEQ ID NO: 96-97). gRNAs were designed to target 3′ region of intron 7 (gRNA-7) and 5′ region of intron 9 (gRNA-9). PAM sites are highlighted in red. (FIG. 1C) PCR genotyping of control and ΔEx8-9 iDMD induced pluripotent stem cell (iPSC) lines using primers upstream and downstream of the gRNA targeting sites (top) and within intron 7 flanking the gRNA-7 targeting site (bottom). Sequencing of PCR product of ΔEx8-9 iDMD validates splicing of intron 7 to intron 9 (SEQ ID NO: 98). PCR primers are indicated by arrows. Arrowhead indicates gRNA targeting site. M denotes marker lane. (FIG. 1D) RT-PCR analysis of dystrophin mRNA expression in control and ΔEx8-9 iDMD iPSC-derived cardiomyocytes. Forward primer targeting exon 1 and reverse primer targeting exon 10 were used. Sequencing confirmed splicing of exon 7 to exon 10, introducing a stop-codon (SEQ ID NO: 99-100). (FIG. 1E) Western blot analysis showing dystrophin protein expression in iPSC-derived cardiomyocytes using anti-dystrophin antibody. Vinculin was used as loading control. n=7 for each group. (FIG. 1F) Immunocytochemistry representations of iPSC-derived cardiomyocytes with anti-dystrophin (red) and anti-troponin I (green). Nuclei are stained with Hoechst 33342 (blue). Scale bar=50 microns. n=4 for each group.

[0017] FIG. 2A-F. Correcting ΔEx8-9 iDMD by exon deletion of exons 3-9 to restore dystrophin expression. (FIG. 2A) Three strategies were used to correct ΔEx8-9 iDMD by CRISPR/Cas9-mediated genomic editing: (1) deleting exons 3-7 to generate ΔEx3-9, (2) deleting exons 6-7 to generate ΔEx6-9, and (3) deleting exons 7-11 to generate ΔEx7-11. Shape and color of boxes denoting DMD exons indicate reading frame and protein coding domains. Yellow designates actin binding domain-1 (ABD-1). Blue marks part of the central rod domain. Red lines indicate actin binding sites (ABS1, ABS2 and ABS3). Red exon indicates exon with stop codon. (FIG. 2B) Illustration showing deletion of exons 3-7 to generate ΔEx3-9. Sequences of gRNAs (SEQ ID NO: 1, SEQ ID NO: 4) and their targeting sites within intron 2 (top, SEQ ID NO: 101-102)) and intron 7 (bottom, SEQ ID NO: 104-105). gRNAs were designed to target 3′ region of intron 2 (gRNA-2) and 5′ region of intron 7 (gRNA-7). Arrowheads mark targeting site of gRNAs. PAM sites are highlighted in red. (FIG. 2C) PCR genotyping of control, ΔEx8-9 iDMD and two clones of ΔEx3-9 induced pluripotent cell (iPSC) lines using primers upstream and downstream of the gRNA targeting sites (top) and within intron 2 flanking the gRNA-2 targeting site (bottom). Sequencing of PCR product of ΔEx3-9 validates splicing of intron 2 to intron 7 (SEQ ID NO: 103). PCR primers are indicated by arrows. Arrowhead indicates gRNA targeting site. M denotes marker lane. (FIG. 2D) RT-PCR analysis of dystrophin mRNA expression in control, ΔEx8-9 iDMD, and two clones of ΔEx3-9 iPSC-derived cardiomyocytes. Forward primer targeting exon 1 and reverse primer targeting exon 10 were used. Sequencing confirmed splicing of exon 2 to exon 10 restoring the open reading frame (SEQ ID NO: 106-107). α-actinin was used as loading control. (FIG. 2E) Western blot analysis showing dystrophin protein expression in iPSC-derived cardiomyocytes using anti-dystrophin antibody. Vinculin was used as loading control. n=7 for control and ΔEx8-9 iDMD, n=3 for ΔEx3-9 clone 1 and ΔEx3-9 clone 2 n=7 for control and ΔEx8-9 iDMD, n=3 for ΔEx3-9 clone 1 and ΔEx3-9 clone 2. (FIG. 2F) Immunocytochemistry representations of iPSC-derived cardiomyocytes with anti-dystrophin (red) and anti-troponin I (green). Nuclei are stained with Hoechst 33342 (blue). Scale bar=50 microns. n=4 for control and ΔEx8-9 iDMD, n=2 for ΔEx3-9 clone 1, and n=1 for ΔEx3-9 clone 2.

[0018] FIG. 3A-E. Correcting ΔEx8-9 iDMD by deleting exons 6 and 7 to restore dystrophin protein expression. (FIG. 3A) Illustration showing deletion of exons 6-7 to generate ΔEx6-9. Sequences of guide RNAs (gRNAs) (SEQ ID NO: 2-3) and their targeting sites within intron 5 (top, SEQ ID NO: 108-109) and intron 7 (bottom, SEQ ID NO: 110-111). gRNAs were designed to target 3′ region of intron 5 (gRNA-5) and 5′ region of intron 7 (gRNA-7). Arrowheads mark targeting site of gRNAs. PAM sites are highlighted in red. (FIG. 3B) PCR genotyping of control, ΔEx8-9 iDMD and two clones of ΔEx6-9 induced pluripotent stem cell (iPSC) lines using primers upstream and downstream of the gRNA targeting sites (top) and within intron 5 flanking the gRNA-5 targeting site (bottom). Sequencing of PCR product of ΔEx6-9 validates splicing of intron 5 to intron 7 (SEQ ID NO: 112). PCR primers are indicated by arrows. Arrowhead indicates gRNA targeting site. M denotes marker lane. (FIG. 3C) RT-PCR analysis of dystrophin mRNA expression in control, ΔEx8-9 iDMD, and two clones of ΔEx6-9 iPSC-derived cardiomyocytes. Forward primer targeting exon 5 and reverse primer targeting exon 10 were used. Sequencing confirmed splicing of exon 5 to exon 10 restoring the open reading frame (SEQ ID NO: 113-114). α-actinin was used as loading control. (FIG. 3D) Western blot analysis showing dystrophin protein expression in iPSC-derived cardiomyocytes using anti-dystrophin antibody. Vinculin was used as loading control. n=7 for control and ΔEx8-9 iDMD, n=3 for ΔEx6-9 clone 1 and ΔEx6-9 clone 2. (FIG. 3E) Immunocytochemistry representations of iPSC-derived cardiomyocytes with anti-dystrophin (red) and anti-troponin I (green). Nuclei are stained with Hoechst 33342 (blue). Scale bar=50 microns. n=4 for control and ΔEx8-9 iDMD, n=3 for ΔEx6-9 clone 1 and ΔEx6-9 clone 2.

[0019] FIG. 4A-F. Correcting ΔEx8-9 iDMD by deleting exons 7-11 partially restores dystrophin protein expression. (FIG. 4A) Illustration showing deletion of exons 7-11 to generate ΔEx7-11. Sequences of guide RNAs (gRNAs) (SEQ ID NO: 115, SEQ ID NO: 118) and their targeting sites within intron 6 (top, SEQ ID NO: 116-117) and intron 11 (bottom, SEQ ID NO: 118-119). gRNAs were designed to target 3′ region of intron 6 (gRNA-6) and 5′ region of intron 11 (gRNA-11). Arrowheads mark gRNA targeting site. PAM sites are highlighted in red. (FIG. 4B) PCR genotyping of control, ΔEx8-9 iDMD and two clones of ΔEx7-11 induced pluripotent stem cell (iPSC) lines using primers upstream and downstream of the gRNA targeting sites (top) and within intron 6 flanking the gRNA-6 targeting site (bottom). Sequencing of PCR product of ΔEx7-11 validates splicing of intron 6 to intron 11 (SEQ ID NO: 121). PCR primers are indicated by arrows. Arrowhead indicates gRNA targeting site. M denotes marker lane. (FIG. 4C) RT-PCR analysis of dystrophin mRNA expression in control, ΔEx8-9 iDMD, and two clones of ΔEx7-11 iPSC-derived cardiomyocytes. Forward primer targeting exon 5 and reverse primer targeting exon 12 were used. Sequencing confirmed splicing of exon 6 to exon 12 restoring the open reading frame (SEQ ID NO: 122-123). α-actinin was used as loading control. (FIG. 4D) Western blot analysis showing dystrophin protein expression in iPSC-derived cardiomyocytes using anti-dystrophin antibody. Vinculin was used as loading control. n=7 for control and ΔEx8-9 iDMD, n=3 for ΔEx7-11 clone 1 and ΔEx7-11 clone 2. (FIG. 4E) Immunocytochemistry representations of iPSC-derived cardiomyocytes with anti-dystrophin (red) and anti-troponin I (green). Nuclei are stained with Hoechst 33342 (blue). Scale bar=50 microns. n=4 for control and ΔEx8-9 iDMD, n=2 for ΔEx7-11 clone 1 and n=1 for ΔEx7-11 clone 2. (FIG. 4F) Western blot analysis of ΔEx7-11 iPSC-derived cardiomyocytes treated with proteasome inhibitor MG132 for 60 hours using anti-dystrophin antibody. GAPDH was used as loading control. n=2.

[0020] FIG. 5A-G. Functional analysis of iPSC-derived cardiomyocytes. (FIG. 5A) Representative recordings of spontaneous Ca²⁺ activity of induced pluripotent cell (iPSC)-derived cardiomyocytes loaded with Ca²⁺ indicator Fluo-4AM. Traces show change in fluorescence intensity (F) in relationship to resting fluorescence intensity (Fo). (FIG. 5B) Relative time to peak (TTP), (FIG. 5C) decay (tau) and (FIG. 5D) transient duration (TD), as measured by calcium imaging. (FIG. 5E) Arrhythmic iPSC-derived cardiomyocytes were identified based on calcium activity. For all corrected iPSC-derived cardiomyocyte lines (panels B-E), data were obtained from two independent clones. n=113 for control; n=105 for ΔEx8-9 iDMD; n=129 for ΔEx3-9; n=121 for ΔEx6-9; and n=122 for ΔEx7-11 iPSC-derived cardiomyocyte lines from 5-11 independent experiments. Data are represented as mean+s.e.m. *P<0.05 by one-way ANOVA. (FIG. 5F) Force of EHM contraction in the presence of increasing Ca²⁺ concentration. EHM generated from two independent control lines (n=8), ΔEx8-9 iDMD (n=6), ΔEx3-9 (n=14), ΔEx6-9 (n=3), and ΔEx7-11 (n=3). (FIG. 5G) Representative recordings of EHM contractions from the indicated groups (same EHM as in FIG. 5F). Data are represented as mean+s.e.m. *P<0.05 by two-way ANOVA and Tukey's post-hoc test.

[0021] FIG. 6A-I Correction of DMD patient-derived iPSCs by deleting exons 8 and 9. (FIG. 6A) Strategy showing CRISPR/Cas9-mediated genomic editing of DMD (Duchene muscular dystrophy) patient (pΔEx3-7) to generate corrected pΔEx3-9 induced pluripotent cell (iPSC) line. Shape and color of boxes denoting DMD exons indicate reading frame and protein coding domains. Yellow designates ABD-1. Blue marks part of central rod domain. Red lines indicate ABS 1. Arrowheads mark targeting site of guide RNAs (gRNAs). Red box marks exon with stop codon. Sequences of gRNAs (SEQ ID NO: 124, SEQ ID NO: 5) and their targeting sites within intron 7 (top, SEQ ID NO: 125-126) and intron 9 (bottom, SEQ ID NO: 128-129). gRNAs were designed to target 3′ region of intron 7 (gRNA-7) and 5′ region of intron 9 (gRNA-9). PAM sites are highlighted in red. (FIG. 6B) PCR genotyping of pΔEx3-7 and pΔEx3-9 iPSC lines using primers upstream and downstream of the gRNA targeting sites. Sequencing of PCR product of pΔEx3-9 validates splicing of intron 7 to intron 9 (SEQ ID NO: 127). PCR primers are indicated by arrows. Arrowheads mark targeting site of gRNAs. M denotes marker lane. (FIG. 6C) RT-PCR analysis of dystrophin mRNA expression in control, pΔEx3-7, pΔEx3-9 iPSC-derived cardiomyocytes. Forward primer targeting 5′UTR and reverse primer targeting exon 10 were used. Sequencing of pΔEx3-7 confirmed splicing of exon 2 to exon 8 (SEQ ID NO: 130-131), introducing a stop-codon. Sequencing pΔEx3-9 confirmed splicing of exon 2 to exon 10 (SEQ ID NO: 132-133) restoring the open reading frame. α-actinin was used as loading control. (FIG. 6D) Western blot analysis showing dystrophin protein expression in iPSC-derived cardiomyocytes using anti-dystrophin antibody. Vinculin was used as loading control. n=7 for control, n=3 for pΔEx3-7 and n=3 for pΔEx3-9. (FIG. 6E) Immunocytochemistry representations of iPSC-derived cardiomyocytes with anti-dystrophin (red) and anti-troponin I (green). Nuclei are stained with Hoechst 33342 (blue). Scale bar=50 microns. n=4 for control, n=2 for pΔEx3-7 and n=2 for pΔEx3-9. (FIG. 6F) Relative time to peak (TTP), (FIG. 6G) decay (tau), (FIG. 6H) transient duration (TD) and (FIG. 6I) percent of arrhythmic cells were measured based on calcium activity of control (n=45), DMD patient pΔEx3-7 (n=40) and corrected pΔEx3-9 (n=65) iPSC-derived cardiomyocytes from 3-5 independent experiments. Data are represented as mean+s.e.m. *P<0.05 by one-way ANOVA (FIGS. 6F-H).

[0022] FIG. 7A-C. Dystrophin protein expression level. Related to FIGS. 3A-E and FIGS. 4A-F. (FIG. 7A) Dystrophin expression levels in ΔEx8-9 iDMD (n=8), ΔEx3-9 (n=4), ΔEx6-9 (n=6), and ΔEx7-11 (n=5) iPSC-derived cardiomyocytes compared to control cell line, indicated by dashed line. Data are represented as mean±s.e.m. *P<0.05. (FIG. 7B) Western blot analysis of dystrophin (top), Myosin heavy chain, Myh, (middle) and GAPDH (bottom) expression in control, ΔEx8-9 iDMD, ΔEx3-9, ΔEx6-9, and ΔEx7-11 iPSC-derived cardiomyocytes. Arrowhead indicates residual dystrophin protein after stripping the blot. Arrow indicates myosin heavy chain expression. (FIG. 7C) Western blot analysis of ΔEx7-11 clone 2 iPSC-derived cardiomyocytes treated with proteasome inhibitor MG132 for 60 hours using anti-dystrophin antibody. GAPDH and Vinculin were used as loading control.

[0023] FIG. 8A-C. Generation and functional analysis of engineered heart muscle (EHM). Related to FIGS. 5A-G. (FIG. 8A) Schematic diagram of EHM generation. (FIG. 8B) Percentage of α-actinin-positive (ACTN2+) cardiomyocytes before EHM generation. n=7 total EHM analyzed. (FIG. 8C) Percentage of EHM arrhythmic contractions.

[0024] FIG. 9A-E. Generation of DMD mouse model by deletion of Dmd exons 8 and 9. (FIG. 9A) Outline of the CRISPR/Cas9 strategy used to generate the DMD mouse model, ΔEx8-9 by excising exons 8 and 9. (FIG. 9B) Hematoxylin and eosin (H&E) immunostaining of quadriceps, diaphragm and heart in wild type (WT) and ΔEx8-9 DMD mice. (FIG. 9C) Dystrophin immunostaining of quadriceps, diaphragm and heart of wild type (WT) and ΔEx8-9 DMD mice. Dystrophin immunostains in red. Nucleus are marked by DAPI stain in blue. (FIG. 9D) Grip strength measured in WT and ΔEx8-9 DMD mice. (FIG. 9E) Serum creatine kinase (CK), a marker of muscle dystrophy that reflects muscle damage and membrane leakage was measured in WT and ΔEx8-9 DMD mice.

### SEQUENCE TABLES

TABLE 1
Human DMD guide RNA for actin binding domain region

| guide | | | PAM |
|---|---|---|---|
| RNAs | DNA sequence | RNA sequence | site |
| intron 2-3′ | AATTAATCTGCCGAAGATGA | AAUUAAUCUGCCGAAGAUGA | CGG |
| | (SEQ ID NO: 1) | (SEQ ID NO: 6) | |
| intron 5-3′ | AAAAGCGCTTTTTGGATAGG | AAAAGCGCUUUUUGGAUAGG | AGG |
| | (SEQ ID NO: 2) | (SEQ ID NO: 7) | |
| intron 7-5′ | TGCAGTATGCTCCATCCATA | UGCAGUAUGCUCCAUCCAUA | GGG |
| | (SEQ ID NO: 3) | (SEQ ID NO: 8) | |
| intron 7-3′ | TGTCAATTCAAATGGTGCAC | UGUCAAUUCAAAUGGUGCAC | TGG |
| | (SEQ ID NO: 4) | (SEQ ID NO: 9) | |
| intron 9-5′ | AAACAAACCAGCTCTTCACG | AAACAAACCAGCUCUUCACG | AGG |
| | (SEQ ID NO: 5) | (SEQ ID NO: 10) | |

TABLE 2
Mouse DMD guide RNA for actin binding domain region

| guide | | | PAM |
|---|---|---|---|
| RNAs | DNA sequence | RNA sequence | site |
| intron 7-3′ | TAGTCTCTAGAGGACGTTCA | UAGUCUCUAGAGGACGUUCA | TGG |
| | (SEQ ID NO: 11) | (SEQ ID NO: 13) | |
| intron 9-5′ | TGTTGTCATGAGGCCTATCT | UGUUGUCAUGAGGCCUAUCU | TGG |
| | (SEQ ID NO: 12) | (SEQ ID NO: 14) | |

### DETAILED DESCRIPTION

[0026] DMD is associated with greater than 4,000 mutations in the DMD gene, which are comprised primarily of exon deletions, as well as exon duplications and small mutations that include point mutations. DMD mutations cluster into two hot spot regions of the gene. One hot spot is located within the 5′ region of the gene, encompassing exons 2-20. These mutations account for ˜15% of all exon deletions and ˜50% of all exon duplications within the DMD gene. Deletion of exons 3-7 are the most frequent. The second DMD hot spot is located in the distal region of the DMD gene, between exons 45-55, accounting for ˜70% of all exon deletions and ˜15% of all exon duplications. Because a majority of patient mutations carry deletions in these hotspots, a therapeutic approach for skipping certain exon applies to large group of patients. The rationale of the exon skipping approach is based on the genetic difference between DMD and Becker muscular dystrophy (BMD) patients. In DMD patients, the reading frame of dystrophin mRNA is disrupted resulting in prematurely truncated, non-functional dystrophin proteins. BMD patients have mutations in the DMD gene that maintain the reading frame allowing the production of internally deleted, but partially functional dystrophins leading to much milder disease symptoms compared to DMD patients.

[0027] Dystrophin protein consists of 3,685 amino acids and can be separated into four domains: 1) the actin binding domain (ABD-1), which consists of amino acids 14-240 and connects the filamentous elements of the cytoskeleton to the cell membrane; 2) the central rod domain, composed of 24 spectrin-like repeats and the second actin-binding domain (ABD-2); 3) the cysteine-rich domain; and 4) the carboxyl-terminal domain. Together, these four domains provide the function of dystrophin as a structural link between the cytoskeleton and extracellular matrix to maintain muscle integrity.

[0028] The dystrophin protein can tolerate internal deletions that maintain a subset of the rod domains with intact amino- and carboxyl-termini regions, resulting in mild loss of muscle function, as seen in patients with BMD. There have been numerous strategies to convert DMD to BMD by skipping or deleting out-of-frame exons and restoring the expression of truncated forms of dystrophin protein. Similarly, shortened forms of dystrophin, referred to as mini- or micro-dystrophins, are being developed for gene therapy. It should be noted that the precise consequences of in-frame deletions on the stability and function of dystrophin are not predictable a priori, as some in-frame deletions cause severe disease while others have only mild effects. Thus, it is important to analyze the dystrophin protein products generated from in-frame deletions before reaching conclusions regarding their potential therapeutic effects.

[0029] Previously, the inventors and others used CRISPR/Cas9-mediated genome editing to permanently correct dystrophin mutations in mouse models of DMD and patient-derived muscle cells. These efforts focused mainly on correcting mutations in the spectrin-like repeat region to restore dystrophin function by generating truncated dystrophin protein, similar to the forms associated with BMD. The ABD-1 of dystrophin contains three actin-binding sites (ABS1-3) that associate with F-actin and are essential for the stabilization of muscle membranes by dystrophin. Little emphasis has been put on editing the ABD-1 region of the DMD gene, although ˜7% of DMD patients have mutations in the ABD-1 domain. In fact, exons 2-7, which encode part of the ABD-1, are the most frequently mutated portion of the 5′-proximal hot spot. In-frame deletions and missense mutations of the 5′ region of the DMD gene that affect the ABD-1 structure have been associated with a decrease in dystrophin protein stability, reduced actin binding affinity, and protein mis-folding and degradation, suggesting that restoring the open reading frame of ABD-1 mutations by genome editing strategies may not be sufficient to correct DMD. On the other hand, medical case studies have reported patients with deletions in exons 3-9 in the DMD gene that exhibit no apparent phenotype, suggesting that precise deletion of exons 3-9 may be an effective approach to correct mutations in the ABD-1 region. Accordingly, uncertainty remains regarding whether gene editing in this region is or is not corrective.

[0030] As described in further detail below, the instant inventors demonstrate that gene editing in the actin-binding domain region of the dystrophin gene is a viable method for treating DMD.

[0031] Human induced pluripotent stem cells (iPSCs) offer a unique opportunity for studying human diseases in a dish. Their unlimited proliferation, ability to undergo clonal selection, and differentiation into different cell types provide a reliable platform for testing gene editing strategies to either create or correct human mutations. Differentiation of DMD-derived iPSCs to cardiomyocytes prior to and following genome editing allows the analysis of DMD phenotypes by assessing dystrophin expression and cardiomyocyte function, such as muscle contractility and Ca²⁺ handling. Assembly of iPSC-derived cardiomyocytes as engineered heart muscle (EHM) allows for direct and controlled measurements of heart muscle force of contraction.

[0032] Here the inventors introduced an exon 8-9 deletion (ΔEx8-9) in the DMD gene of healthy donor-derived iPSCs to generate a DMD iPSC line. This ΔEx8-9 DMD iPSC line allowed correction of the DMD mutation by various gene editing strategies and then assess truncated dystrophin functionality in comparison to isogenic control cells. They corrected the exon 8-9 deletion mutation using three different exon-deletion strategies to restore the open reading frames: 1) deleting exons 3-7 to generate ΔEx3-9, which excises the ABS-2 and ABS-3 regions; 2) deleting exons 6-7 to generate ΔEx6-9, which excises ABS-3; and 3) deleting exons 7-11 to generate ΔEx7-11, which leaves all three ABS regions intact. The inventors show that deletion DMD exons 3-9 generates a truncated dystrophin but maintains the structure of dystrophin such that it restores cardiomyocyte functionality. These findings provide a promising strategy for correction of DMD mutations within the proximal hot spot of the DMD gene by genomic editing, allowing restoration of dystrophin expression and function. These and other aspects of the disclosure are reproduced below.

[0033] To further assess the efficiency and optimize CRISPR/Cas9-mediated exon skipping in vivo, a mimic of the human ABD-1 region mutation was generated in a mouse model by deleting the exons 8 and 9 using CRISPR/Cas9 system directed by two single guide RNAs (sgRNAs). The ΔEx8-9 DMD mouse model exhibits dystrophic myofibers, increased serum creatine kinase level, and reduced muscle function, thus providing a new representative model of DMD. These and other aspects of the disclosure are reproduced below.

[0034] As used herein the specification, “a” or “an” may mean one or more. As used herein in the claim(s), when used in conjunction with the word “comprising”, the words “a” or “an” may mean one or more than one.

[0035] The use of the term “or” in the claims is used to mean “and/or” unless explicitly indicated to refer to alternatives only or the alternatives are mutually exclusive, although the disclosure supports a definition that refers to only alternatives and “and/or.” As used herein “another” may mean at least a second or more.

[0036] Throughout this application, the term “about” is used to indicate that a value includes the inherent variation of error for the device, for the method being employed to determine the value, or that exists among the study subjects. Such an inherent variation may be a variation of ±10% of the stated value.

### I. DUCHENNE MUSCULAR DYSTROPHY

[0037] A. Background

[0038] Duchenne muscular dystrophy (DMD) is a recessive X-linked form of muscular dystrophy, affecting around 1 in 5000 boys, which results in muscle degeneration and premature death. The disorder is caused by a mutation in the gene dystrophin (see GenBank Accession No. NC_000023.11), located on the human X chromosome, which codes for the protein dystrophin (GenBank Accession No. AAA53189; SEQ ID NO. 15), the sequence of which is reproduced below:

| | |
|---|---|
| 1 | MLWWEEVEDC YEREDVQKKT FTKWVNAQFS KFGKQHIENL FSDLQDGRRL LDLLEGLTGQ |
| 61 | KLPKEKGSTR VHALNNVNKA LRVLQNNNVD LVNIGSTDIV DGNHKLTLGL IWNIILHWQV |
| 121 | KNVMKNIMAG LQQTNSEKIL LSWVRQSTRN YPQVNVINFT TSWSDGLALN ALIHSHRPDL |
| 181 | FDWNSVVCQQ SATQRLEHAF NIARYQLGIE KLLDPEDVDT TYPDKKSILM YITSLFQVLP |
| 241 | QQVSIEAIQE VEMLPRPPKV TKEEHFQLHH QMHYSQQITV SLAQGYERTS SPKPRFKSYA |
| 301 | YTQAAYVTTS DPTRSPFPSQ HLEAPEDKSF GSSLMESEVN LDRYQTALEE VLSWLLSAED |
| 361 | TLQAQGEISN DVEVVKDQFH THEGYMMDLT AHQGRVGNIL QLGSKLIGTG KLSEDEETEV |
| 421 | QEQMNLLNSR WECLRVASME KQSNLHRVLM DLQNQKLKEL NDWLTKTEER TRKMEEEPLG |
| 481 | PDLEDLKRQV QQHKVLQEDL EQEQVRVNSL THMVVVVDES SGDHATAALE EQLKVLGDRW |
| 541 | ANICRWTEDR WVLLQDILLK WQRLTEEQCL FSAWLSEKED AVNKIHTTGF KDQNEMLSSL |
| 601 | QKLAVLKADL EKKKQSMGKL YSLKQDLLST LKNKSVTQKT EAWLDNFARC WDNLVQKLEK |
| 661 | STAQISQAVT TTQPSLTQTT VMETVTTVTT REQILVKHAQ EELPPPPPQK KRQITVDSEI |
| 721 | RKRLDVDITE LHSWITRSEA VLQSPEFAIF RKEGNFSDLK EKVNAIEREK AEKFRKLQDA |
| 781 | SRSAQALVEQ MVNEGVNADS IKQASEQLNS RWIEFCQLLS ERLNWLEYQN NIIAFYNQLQ |
| 841 | QLEQMTTTAE NWLKIQPTTP SEPTAIKSQL KICKDEVNRL SGLQPQIERL KIQSIALKEK |
| 901 | GQGPMFLDAD FVAFTNHFKQ VFSDVQAREK ELQTIFDTLP PMRYQETMSA IRTWVQQSET |
| 961 | KLSIPQLSVT DYEIMEQRLG ELQALQSSLQ EQQSGLYYLS TTVKEMSKKA PSEISRKYQS |
| 1021 | EFEEIEGRWK KLSSQLVEHC QKLEEQMNKL RKIQNHIQTL KKWMAEVDVF LKEEWPALGD |
| 1081 | SEILKKQLKQ CRLLVSDIQT IQPSLNSVNE GGQKIKNEAE PEFASRLETE LKELNTQWDH |
| 1141 | MCQQVYARKE ALKGGLEKTV SLQKDLSEMH EWMTQAEEEY LERDFEYKTP DELQKAVEEM |
| 1201 | KRAKEEAQQK EAKVKLLTES VNSVIAQAPP VAQEALKKEL ETLTTNYQWL CTRLNGKCKT |
| 1261 | LEEVWACWHE LLSYLEKANK WLNEVEFKLK TTENIPGGAE EISEVLDSLE NLMRHSEDNP |
| 1321 | NQIRILAQTL TDGGVMDELI NEELETFNSR WRELHEEAVR RQKLLEQSIQ SAQETEKSLH |
| 1381 | LIQESLTFID KQLAAYIADK VDAAQMPQEA QKIQSDLTSH EISLEEMKKH NQGKEAAQRV |
| 1441 | LSQIDVAQKK LQDVSMKFRL FQKPANFELR LQESKMILDE VKMHLPALET KSVEQEVVQS |
| 1501 | QLNHCVNLYK SLSEVKSEVE MVIKTGRQIV QKKQTENPKE LDERVTALKL HYNELGAKVT |
| 1561 | ERKQQLEKCL KLSRKMRKEM NVLTEWLAAT DMELTKRSAV EGMPSNLDSE VAWGKATQKE |
| 1621 | IEKQKVHLKS ITEVGEALKT VLGKKETLVE DKLSLLNSNW IAVTSRAEEW LNLLLEYQKH |
| 1681 | METFDQNVDH ITKWIIQADT LLDESEKKKP QQKEDVLKRL KAELNDIRPK VDSTRDQAAN |
| 1741 | LMANRGDHCR KLVEPQISEL NHRFAAISHR IKTGKASIPL KELEQFNSDI QKLLEPLEAE |
| 1801 | IQQGVNLKEE DFNKDMNEDN EGTVKELLQR GDNLQQRITD ERKREEIKIK QQLLQTKHNA |
| 1861 | LKDLRSQRRK KALEISHQWY QYKRQADDLL KCLDDIEKKL ASLPEPRDER KIKEIDRELQ |
| 1921 | KKKEELNAVR RQAEGLSEDG AAMAVEPTQI QLSKRWREIE SKFAQFRRLN FAQIHTVREE |
| 1981 | TMMVMTEDMP LEISYVPSTY LTEITHVSQA LLEVEQLLNA PDLCAKDFED LFKQEESLKN |
| 2041 | IKDSLQQSSG RIDIIHSKKT AALQSATPVE RVKLQEALSQ LDFQWEKVNK MYKDRQGRFD |
| 2101 | RSVEKWRRFH YDIKIFNQWL TEAEQFLRKT QIPENWEHAK YKWYLKELQD GIGQRQTVVR |
| 2161 | TLNATGEEII QQSSKTDASI LQEKLGSLNL RWQEVCKQLS DRKKRLEEQK NILSEFQRDL |
| 2221 | NEFVLWLEEA DNIASIPLEP GKEQQLKEKL EQVKLLVEEL PLRQGILKQL NETGGPVLVS |
| 2281 | APISPEEQDK LENKLKQTNL QWIKVSRALP EKQGEIEAQI KDLGQLEKKL EDLEEQLNHL |
| 2341 | LLWLSPIRNQ LEIYNQPNQE GPFDVQETEI AVQAKQPDVE EILSKGQHLY KEKPATQPVK |
| 2401 | RKLEDLSSEW KAVNRLLQEL RAKQPDLAPG LTTIGASPTQ TVTLVTQPVV TKETAISKLE |
| 2461 | MPSSLMLEVP ALADFNRAWT ELTDWLSLLD QVIKSQRVMV GDLEDINEMI IKQKATMQDL |
| 2521 | EQRRPQLEEL ITAAQNLKNK TSNQEARTII TDRIERIQNQ WDEVQEHLQN RRQQLNEMLK |
| 2581 | DSTQWLEAKE EAEQVLGQAR AKLESWKEGP YTVDAIQKKI TETKQLAKDL RQWQTNVDVA |
| 2641 | NDLALKLLRD YSADDTRKVH MITENINASW RSIHKRVSER EAALEETHRL LQQFPLDLEK |
| 2701 | FLAWLTEAET TANVLQDATR KERLLEDSKG VKELMKQWQD LQGEIEAHTD VYHNLDENSQ |
| 2761 | KILRSLEGSD DAVLLQRRLD NMNFKWSELR KKSLNIRSHL EASSDQWKRL HLSLQELLVW |
| 2821 | LQLKDDELSR QAPIGGDFPA VQKQNDVHRA FKRELKTKEP VIMSTLETVR IFLTEQPLEG |
| 2881 | LEKLYQEPRE LPPEERAQNV TRLLRKQAEE VNTEWEKLNL HSADWQRKID ETLERLQELQ |
| 2941 | EATDELDLKL RQAEVIKGSW QPVGDLLIDS LQDHLEKVKA LRGEIAPLKE NVSHVNDLAR |
| 3001 | QLTTLGIQLS PYNLSTLEDL NTRWKLLQVA VEDRVRQLHE AHRDFGPASQ HFLSTSVQGP |
| 3061 | WERAISPNKV PYYINHETQT TCWDHPKMTE LYQSLADLNN VRFSAYRTAM KLRRLQKALC |
| 3121 | LDLLSLSAAC DALDQHNLKQ NDQPMDILQI INCLTTIYDR LEQEHNNLVN VPLCVDMCLN |
| 3181 | WLLNVYDTGR TGRIRVLSFK TGIISLCKAH LEDKYRYLFK QVASSTGFCD QRRLGLLLHD |
| 3241 | SIQIPRQLGE VASFGGSNIE PSVRSCFQFA NNKPEIEAAL FLDWMRLEPQ SMVWLPVLHR |
| 3301 | VAAAETAKHQ AKCNICKECP IIGFRYRSLK HFNYDICQSC FFSGRVAKGH KMHYPMVEYC |
| 3361 | TPTTSGEDVR DFAKVLKNKF RTKRYFAKHP RMGYLPVQTV LEGDNMETPV TLINFWPVDS |
| 3421 | APASSPQLSH DDTHSRIEHY ASRLAEMENS NGSYLNDSIS PNESIDDEHL LIQHYCQSLN |
| 3481 | QDSPLSQPRS PAQILISLES EERGELERIL ADLEEENRNL QAEYDRLKQQ HEHKGLSPLP |
| 3541 | SPPEMMPTSP QSPRDAELIA EAKLLRQHKG RLEARMQILE DHNKQLESQL HRLRQLLEQP |
| 3601 | QAEAKVNGTT VSSPSTSLQR SDSSQPMLLR VVGSQTSDSM GEEDLLSPPQ DTSTGLEEVM |
| 3661 | EQLNNSFPSS RGRNTPGKPM REDTM |

[0039] In humans, dystrophin mRNA contains 79 exons. Dystrophin mRNA is known to be alternatively spliced, resulting in various isoforms. Exemplary dystrophin isoforms are listed in Table 3.

TABLE 3
Dystrophin isoforms

| | | Nucleic | | | |
|---|---|---|---|---|---|
| | | Acid | | Protein | |
| Sequence | Nucleic Acid | SEQ ID | Protein Accession | SEQ | Description |
| Name | Accession No. | NO: | No. | NO: | ID |
| DMD Genomic | NC_000023.11 | None | None | None | Sequence from Human |
| Sequence | (positions | | | | X Chromosome (at |
| | 31119219 to | | | | positions Xp21.2 to |
| | 33339609) | | | | p21.1) from Assembly |
| | | | | | GRCh38.p7 |
| | | | | | (GCF_000001405.33) |
| Dystrophin | NM_000109.3 | 16 | NP_000100.2 | 17 | Transcript Variant: |
| Dp427c isoform | | | | | transcript Dp427c is |
| | | | | | expressed |
| | | | | | predominantly in |
| | | | | | neurons of the cortex |
| | | | | | and the CA regions of |
| | | | | | the hippocampus. It |
| | | | | | uses a unique |
| | | | | | promoter/exon 1 |
| | | | | | located about 130 kb |
| | | | | | upstream of the |
| | | | | | Dp427m transcript |
| | | | | | promoter. The |
| | | | | | transcript includes the |
| | | | | | common exon 2 of |
| | | | | | transcript Dp427m and |
| | | | | | has a similar length of |
| | | | | | 14 kb. The Dp427c |
| | | | | | isoform contains a |
| | | | | | unique N-terminal |
| | | | | | MED sequence, instead |
| | | | | | of the |
| | | | | | MLWWEEVEDCY |
| | | | | | sequence of isoform |
| | | | | | Dp427m. The |
| | | | | | remainder of isoform |
| | | | | | Dp427c is identical to |
| | | | | | isoform Dp427m. |
| Dystrophin | NM_004006.2 | 18 | NP_003997.1 | 19 | Transcript Variant: |
| Dp427m | | | | | transcript Dp427m |
| isoform | | | | | encodes the main |
| | | | | | dystrophin protein |
| | | | | | found in muscle. As a |
| | | | | | result of alternative |
| | | | | | promoter use, exon 1 |
| | | | | | encodes a unique N- |
| | | | | | terminal |
| | | | | | MLWWEEVEDCY aa |
| | | | | | sequence. |
| Dystrophin | NM_004009.3 | 20 | NP_004000.1 | 21 | Transcript Variant: |
| Dp427p1 | | | | | transcript Dp427p1 |
| isoform | | | | | initiates from a unique |
| | | | | | promoter/exon 1 |
| | | | | | located in what |
| | | | | | corresponds to the first |
| | | | | | intron of transcript |
| | | | | | Dp427m. The transcript |
| | | | | | adds the common exon |
| | | | | | 2 of Dp427m and has a |
| | | | | | similar length (14 kb). |
| | | | | | The Dp427p1 isoform |
| | | | | | replaces the |
| | | | | | MLWWEEVEDCY - |
| | | | | | start of Dp427m with a |
| | | | | | unique N-terminal |
| | | | | | MSEVSSD aa |
| | | | | | sequence. |
| Dystrophin | NM_004011.3 | 22 | NP_004002.2 | 23 | Transcript Variant: |
| Dp260-1 | | | | | transcript Dp260-1 uses |
| isoform | | | | | exons 30-79, and |
| | | | | | originates from a |
| | | | | | promoter/exon 1 |
| | | | | | sequence located in |
| | | | | | intron 29 of the |
| | | | | | dystrophin gene. As a |
| | | | | | result, Dp260-1 |
| | | | | | contains a 95 bp exon 1 |
| | | | | | encoding a unique N- |
| | | | | | terminal 16 aa |
| | | | | | MTEIILLIFFPAYFLN- |
| | | | | | sequence that replaces |
| | | | | | amino acids 1-1357 of |
| | | | | | the full-length |
| | | | | | dystrophin product |
| | | | | | (Dp427m isoform). |
| Dystrophin | NM_004012.3 | 24 | NP_004003.1 | 25 | Transcript Variant: |
| Dp260-2 | | | | | transcript Dp260-2 uses |
| isoform | | | | | exons 30-79, starting |
| | | | | | from a promoter/exon 1 |
| | | | | | sequence located in |
| | | | | | intron 29 of the |
| | | | | | dystrophin gene that is |
| | | | | | alternatively spliced |
| | | | | | and lacks N-terminal |
| | | | | | amino acids 1-1357 of |
| | | | | | the full length |
| | | | | | dystrophin (Dp427m |
| | | | | | isoform). The Dp260-2 |
| | | | | | transcript encodes a |
| | | | | | unique N-terminal |
| | | | | | MSARKLRNLSYKK |
| | | | | | sequence. |
| Dystrophin | NM_004013.2 | 26 | NP_004004.1 | 27 | Transcript Variant: |
| Dp140 isoform | | | | | Dp140 transcripts use |
| | | | | | exons 45-79, starting at |
| | | | | | a promoter/exon 1 |
| | | | | | located in intron 44. |
| | | | | | Dp140 transcripts have |
| | | | | | along (1 kb) 5′ UTR |
| | | | | | since translation is |
| | | | | | initiated in exon 51 |
| | | | | | (corresponding to aa |
| | | | | | 2461 of dystrophin). In |
| | | | | | addition to the |
| | | | | | alternative promoter |
| | | | | | and exon 1, differential |
| | | | | | splicing of exons 71-74 |
| | | | | | and 78 produces at least |
| | | | | | five Dp140 isoforms. |
| | | | | | Of these, this transcript |
| | | | | | (Dp140) contains all of |
| | | | | | the exons. |
| Dystrophin | NM_004014.2 | 28 | NP_004005.1 | 29 | Transcript Variant: |
| Dp116 isoform | | | | | transcript Dp116 uses |
| | | | | | exons 56-79, starting |
| | | | | | from a promoter/exon 1 |
| | | | | | within intron 55. As a |
| | | | | | result, the Dp116 |
| | | | | | isoform contains a |
| | | | | | unique N-terminal |
| | | | | | MLHRKTYHVK aa |
| | | | | | sequence, instead of aa |
| | | | | | 1-2739 of dystrophin. |
| | | | | | Differential splicing |
| | | | | | produces several |
| | | | | | Dp116-subtypes. The |
| | | | | | Dp116 isoform is also |
| | | | | | known as S-dystrophin |
| | | | | | or apo-dystrophin-2. |
| Dystrophin | NM_004015.2 | 30 | NP_004006.1 | 31 | Transcript Variant: |
| Dp71 isoform | | | | | Dp71 transcripts use |
| | | | | | exons 63-79 with a |
| | | | | | novel 80- to 100-nt |
| | | | | | exon containing an |
| | | | | | ATG start site for a |
| | | | | | new coding sequence of |
| | | | | | 17 nt. The short coding |
| | | | | | sequence is in-frame |
| | | | | | with the consecutive |
| | | | | | dystrophin sequence |
| | | | | | from exon 63. |
| | | | | | Differential splicing of |
| | | | | | exons 71 and 78 |
| | | | | | produces at least four |
| | | | | | Dp71 isoforms. Of |
| | | | | | these, this transcript |
| | | | | | (Dp71) includes both |
| | | | | | exons 71 and 78. |
| Dystrophin | NM_004016.2 | 32 | NP_004007.1 | 33 | Transcript Variant: |
| Dp71b isoform | | | | | Dp71 transcripts use |
| | | | | | exons 63-79 with a |
| | | | | | novel 80- to 100-nt |
| | | | | | exon containing an |
| | | | | | ATG start site for a |
| | | | | | new coding sequence of |
| | | | | | 17 nt. The short coding |
| | | | | | sequence is in-frame |
| | | | | | with the consecutive |
| | | | | | dystrophin sequence |
| | | | | | from exon 63. |
| | | | | | Differential splicing of |
| | | | | | exons 71 and 78 |
| | | | | | produces at least four |
| | | | | | Dp71 isoforms. Of |
| | | | | | these, this transcript |
| | | | | | (Dp71b) lacks exon 78 |
| | | | | | and encodes a protein |
| | | | | | with a different C- |
| | | | | | terminus than Dp71 and |
| | | | | | Dp71a isoforms. |
| Dystrophin | NM_004017.2 | 34 | NP_004008.1 | 35 | Transcript Variant: |
| Dp71a isoform | | | | | Dp71 transcripts use |
| | | | | | exons 63-79 with a |
| | | | | | novel 80- to 100-nt |
| | | | | | exon containing an |
| | | | | | ATG start site for a |
| | | | | | new coding sequence of |
| | | | | | 17 nt. The short coding |
| | | | | | sequence is in-frame |
| | | | | | with the consecutive |
| | | | | | dystrophin sequence |
| | | | | | from exon 63. |
| | | | | | Differential splicing of |
| | | | | | exons 71 and 78 |
| | | | | | produces at least four |
| | | | | | Dp71 isoforms. Of |
| | | | | | these, this transcript |
| | | | | | (Dp71a) lacks exon 71. |
| Dystrophin | NM_004018.2 | 36 | NP_004009.1 | 37 | Transcript Variant: |
| Dp71ab isoform | | | | | Dp71 transcripts use |
| | | | | | exons 63-79 with a |
| | | | | | novel 80- to 100-nt |
| | | | | | exon containing an |
| | | | | | ATG start site for a |
| | | | | | new coding sequence of |
| | | | | | 17 nt. The short coding |
| | | | | | sequence is in-frame |
| | | | | | with the consecutive |
| | | | | | dystrophin sequence |
| | | | | | from exon 63. |
| | | | | | Differential splicing of |
| | | | | | exons 71 and 78 |
| | | | | | produces at least four |
| | | | | | Dp71 isoforms. Of |
| | | | | | these, this transcript |
| | | | | | (Dp71ab) lacks both |
| | | | | | exons 71 and 78 and |
| | | | | | encodes a protein with |
| | | | | | a C-terminus like |
| | | | | | isoform Dp71b. |
| Dystrophin | NM_004019.2 | 38 | NP_004010.1 | 39 | Transcript Variant: |
| Dp40 isoform | | | | | transcript Dp40 uses |
| | | | | | exons 63-70. The 5′ |
| | | | | | UTR and encoded first |
| | | | | | 7 aa are identical to that |
| | | | | | in transcript Dp71, but |
| | | | | | the stop codon lies at |
| | | | | | the splice junction of |
| | | | | | the exon/intron 70. The |
| | | | | | 3′ UTR includes nt |
| | | | | | from intron 70 which |
| | | | | | includes an alternative |
| | | | | | polyadenylation site. |
| | | | | | The Dp40 isoform |
| | | | | | lacks the normal C- |
| | | | | | terminal end of full- |
| | | | | | length dystrophin (aa |
| | | | | | 3409-3685). |
| Dystrophin | NM_004020.3 | 40 | NP_004011.2 | 41 | Transcript Variant: |
| Dp140c isoform | | | | | Dp140 transcripts use |
| | | | | | exons 45-79, starting at |
| | | | | | a promoter/exon 1 |
| | | | | | located in intron 44. |
| | | | | | Dp140 transcripts have |
| | | | | | along (1 kb) 5′ UTR |
| | | | | | since translation is |
| | | | | | initiated in exon 51 |
| | | | | | (corresponding to aa |
| | | | | | 2461 of dystrophin). In |
| | | | | | addition to the |
| | | | | | alternative promoter |
| | | | | | and exon 1, differential |
| | | | | | splicing of exons 71-74 |
| | | | | | and 78 produces at least |
| | | | | | five Dp140 isoforms. |
| | | | | | Of these, this transcript |
| | | | | | (Dp140c) lacks exons |
| | | | | | 71-74. |
| Dystrophin | NM_004021.2 | 42 | NP_004012.1 | 43 | Transcript Variant: |
| Dp140b | | | | | Dp140 transcripts use |
| isoform | | | | | exons 45-79, starting at |
| | | | | | a promoter/exon 1 |
| | | | | | located in intron 44. |
| | | | | | Dp140 transcripts have |
| | | | | | along (1 kb) 5′ UTR |
| | | | | | since translation is |
| | | | | | initiated in exon 51 |
| | | | | | (corresponding to aa |
| | | | | | 2461 of dystrophin). In |
| | | | | | addition to the |
| | | | | | alternative promoter |
| | | | | | and exon 1, differential |
| | | | | | splicing of exons 71-74 |
| | | | | | and 78 produces at least |
| | | | | | five Dp140 isoforms. |
| | | | | | Of these, this transcript |
| | | | | | (Dp140b) lacks exon 78 |
| | | | | | and encodes a protein |
| | | | | | with a unique C- |
| | | | | | terminus. |
| Dystrophin | NM_004022.2 | 44 | NP_004013.1 | 45 | Transcript Variant: |
| Dp140ab | | | | | Dp140 transcripts use |
| isoform | | | | | exons 45-79, starting at |
| | | | | | a promoter/exon 1 |
| | | | | | located in intron 44. |
| | | | | | Dp140 transcripts have |
| | | | | | along (1 kb) 5′ UTR |
| | | | | | since translation is |
| | | | | | initiated in exon 51 |
| | | | | | (corresponding to aa |
| | | | | | 2461 of dystrophin). In |
| | | | | | addition to the |
| | | | | | alternative promoter |
| | | | | | and exon 1, differential |
| | | | | | splicing of exons 71-74 |
| | | | | | and 78 produces at least |
| | | | | | five Dp140 isoforms. |
| | | | | | Of these, this transcript |
| | | | | | (Dp140ab) lacks exons |
| | | | | | 71 and 78 and encodes |
| | | | | | a protein with a unique |
| | | | | | C-terminus. |
| Dystrophin | NM_004023.2 | 46 | NP_004014.1 | 47 | Transcript Variant: |
| Dp140bc | | | | | Dp140 transcripts use |
| isoform | | | | | exons 45-79, starting at |
| | | | | | a promoter/exon 1 |
| | | | | | located in intron 44. |
| | | | | | Dp140 transcripts have |
| | | | | | along (1 kb) 5′ UTR |
| | | | | | since translation is |
| | | | | | initiated in exon 51 |
| | | | | | (corresponding to aa |
| | | | | | 2461 of dystrophin). In |
| | | | | | addition to the |
| | | | | | alternative promoter |
| | | | | | and exon 1, differential |
| | | | | | splicing of exons 71-74 |
| | | | | | and 78 produces at least |
| | | | | | five Dp140 isoforms. |
| | | | | | Of these, this transcript |
| | | | | | (Dp140bc) lacks exons |
| | | | | | 71-74 and 78 and |
| | | | | | encodes a protein with |
| | | | | | a unique C-terminus. |
| Dystrophin | XM_006724469.3 | 48 | XP_006724532.1 | 49 | |
| isoform X2 | | | | | |
| Dystrophin | XM_011545467.1 | 50 | XP_011543769.1 | 51 | |
| isoform X5 | | | | | |
| Dystrophin | XM_006724473.2 | 52 | XP_006724536.1 | 53 | |
| isoform X6 | | | | | |
| Dystrophin | XM_006724475.2 | 54 | XP_006724538.1 | 55 | |
| isoform X8 | | | | | |
| Dystrophin | XM_017029328.1 | 56 | XP_016884817.1 | 57 | |
| isoform X4 | | | | | |
| Dystrophin | XM_006724468.2 | 58 | XP_006724531.1 | 59 | |
| isoform X1 | | | | | |
| Dystrophin | XM_017029331.1 | 60 | XP_016884820.1 | 61 | |
| isoform X13 | | | | | |
| Dystrophin | XM_006724470.3 | 62 | XP_006724533.1 | 63 | |
| isoform X3 | | | | | |
| Dystrophin | XM_006724474.3 | 64 | XP_006724537.1 | 65 | |
| isoform X7 | | | | | |
| Dystrophin | XM_011545468.2 | 66 | XP_011543770.1 | 67 | |
| isoform X9 | | | | | |
| Dystrophin | XM_017029330.1 | 68 | XP_016884819.1 | 69 | |
| isoform X11 | | | | | |
| Dystrophin | XM_017029329.1 | 70 | XP_016884818.1 | 71 | |
| isoform X10 | | | | | |
| Dystrophin | XM_011545469.1 | 72 | XP_011543771.1 | 73 | |
| isoform X12 | | | | | |

[0040] The murine dystrophin protein has the following amino acid sequence (Uniprot Accession No. P11531, SEQ. ID. NO. 74):

| | |
|---|---|
| 1 | MWWVDCYRDV KKTTKWNASK GKHDNSDDGK RDGTGKKKGS TRVHANNVNK ARVKNNVDVN |
| 61 | GSTDVDGNHK TGWNHWVKNV MKTMAGTNSK SWVRSTRNYV NVNTSSWSDG ANAHSHRDDW |
| 121 | NSVVSHSATR HANAKCGKDD VATTYDKKSM YTSVVSAVMR TSSKVTRHHH MHYSTVSAGY |
| 181 | TSSSKRKSYA TAAYVATSDS TSYSHARDKS DSSMTVNDSY TAVSWSADTR AGSNDVVKHA |
| 241 | HGMMDTSHGV GNVGSVGKGK SDAVMNNSRW CRVASMKSKH KVMDNKKDDW TKTRTKKMGD |
| 301 | DKCVHKVDVR VNSTHMVVVV DSSGDHATAA KVGDRWANCR WTDRWVDKWH TCSTWSKDAM |
| 361 | KNTSGKDNMM SSHKSTKDKK KTMKSSNDSA KNKSVTKMWM NARWDNTKKS SASAVTTTST |
| 421 | TTVMTVTMVT TRMVKHAKKR TVDSRKRDVD THSWTRSAVS SAVYRKGNSD KVNAARKAKR |
| 481 | KDASRSAAVM ANGVNASRAS NSRWTCSRVN WYTNTYNMTT TANKTSTTST AKSKCKDVNR |
| 541 | SAKSKKGGMD ADVATNHNHD GVRAKKTDTM RYTMSSRTWS SKSVYSVTYM RGKASSKNGN |
| 601 | YSDTVKMAKK ASCKYSGHWK KSSVSCKHMN KRKNHKTKWM AVDVKWAGDA KKKCRVGDTS |
| 661 | NSVNGGKKSA ASRTRNTWDH CRVYTRKAKA GDKTVSKDSM HWMTAYRDYK TDTAVMKRAK |
| 721 | AKTKVKTTVN SVAHASAAKK TTTNYWCTRN GKCKTVWACW HSYKANKWNV KKTMNVAGTV |
| 781 | SNMHHSNNRA TTDGGVMDNT NSRWRHAVRK KSSAKSHSDK AAYTDKVDAA MAKSDTSHSM |
| 841 | KKHNGKDANR VSDVAKKDVS MKRKANRSKM DVKMHATKSV VSSHCVNYKS SVKSVMVKTG |
| 901 | RVKKTNKDRV TAKHYNGAKV TRKKCKSRKM RKMNVTWAAT DTTKRSAVGM SNDSVAWGKA |
| 961 | TKKKAHKSVT GSKMVGKKTV DKSNSNWAVT SRVWNYKHMT DNTKWHADDS KKKKDKRKAM |
| 1021 | NDMRKVDSTR DAAKMANRGD HCRKVVSNRR AASHRKTGKA SKNSDKAGVN KDNKDMSDNG |
| 1081 | TVNRGDNRTD RKRKKTKHNA KDRSRRKKAS HWYYKRADDK CDKKASRDRK KDRKKKNAVR |
| 1141 | RAGSNGAAMA VTSKRWRSNA RRNAHTHTMV VTTDMDVSYV STYTSHASVD HNTCAKDDKS |
| 1201 | KNKDNSGRDH KKKTAASATS MKVKVAVAMD GKHRMYKRGR DRSVKWRHHY DMKVNWNVKK |
| 1261 | TNNWHAKYKW YKDGGRAVVR TNATGSSKTD VNKGSSRWHD CKARRKRKNV SRDNVWADNA |
| 1321 | TGDKVKARGK NTGGAVVSAR DKKKKTNWKV SRAKGVHKDR DHWSRNYNSA GDKVTVHGKA |
| 1381 | DVRSKGHYKK STVKRKDRSW AVNHRRTKDR AGSTTGASAS TVTVTSVVTK TVSKMSSVAA |
| 1441 | DNRAWTTDWS DRVKSRVMVG DDNMKKATDR RTAANKNKTS NARTTDRRWD VNRRNMKDST |
| 1501 | WAKAVGVRGK DSWKGHTVDA KKTTKAKDRR SVDVANDAKR DYSADDTRKV HMTNNTSWGN |
| 1561 | HKRVSAATHR DKSWTATTAN VDASRKKDSR GVRMKWDGTH TDYHNDNGKR SGSDARRDNM |
| 1621 | NKWSKKSNRS HASSDWKRHS VWKDDSRAGG DAVKNDHRAK RKTKVMSTTV RTGKYRRANV |
| 1681 | TRRKAVNAWD KNRSADWRKD ARAADDKRAV KGSWVGDDSD HKVKARGAKN VNRVNDAHTT |
| 1741 | GSYNSTDNTR WRVAVDRVRH AHRDGASHST SVGWRASNKV YYNHTTTCWD HKMTYSADNN |
| 1801 | VRSAYRTAMK RRKACDSSAA CDADHNKNDM DNCTTYDRHN NVNVCVDMCN WNVYDTGRTG |
| 1861 | RRVSKTGSCK AHDKYRYKVA SSTGCDRRGH DSRGVASGGS NSVRSCANNK AADWMRSMVW |
| 1921 | VHRVAAATAK HAKCNCKCGR YRSKHNYDCS CSGRVAKGHK MHYMVYCTTT SGDVRDAKVK |
| 1981 | NKRTKRYAKH RMGYVTVGDN MTVTNWVDSA ASSSHDDTHS RHYASRAMNS NGSYNDSSNS |
| 2041 | DDHHYCSNDS SRSASSRGRA DNRNAYDRKH HKGSSMMTSS RDAAAKRHKG RARMDHNKSH |
| 2101 | RRAAKVNGTT VSSSTSRSDS SMRVVGSTSS MGDSDTSTGV MNNSSSRGRN AGKMRDTM |

[0041] Dystrophin is an important component within muscle tissue that provides structural stability to the dystroglycan complex (DGC) of the cell membrane. While both sexes can carry the mutation, females are rarely affected with the skeletal muscle form of the disease.

[0042] Mutations vary in nature and frequency. Large genetic deletions are found in about 60-70% of cases, large duplications are found in about 10% of cases, and point mutants or other small changes account for about 15-30% of cases. One study examined some 7000 mutations and catalogued a total of 5,682 large mutations (80% of total mutations), of which 4,894 (86%) were deletions (1 exon or larger) and 784 (14%) were duplications (1 exon or larger). There were 1,445 small mutations (smaller than 1 exon, 20% of all mutations), of which 358 (25%) were small deletions and 132 (9%) small insertions, while 199 (14%) affected the splice sites. Point mutations totaled 756 (52% of small mutations) with 726 (50%) nonsense mutations and 30 (2%) missense mutations. Finally, 22 (0.3%) mid-intronic mutations were observed. In addition, mutations were identified within the database that would potentially benefit from novel genetic therapies for DMD including stop codon read-through therapies (10% of total mutations) and exon skipping therapy (80% of deletions and 55% of total mutations).

[0043] B. Symptoms

[0044] Symptoms usually appear in boys between the ages of 2 and 3 and may be visible in early infancy. Even though symptoms do not appear until early infancy, laboratory testing can identify children who carry the active mutation at birth. Progressive proximal muscle weakness of the legs and pelvis associated with loss of muscle mass is observed first. Eventually this weakness spreads to the arms, neck, and other areas. Early signs may include pseudohypertrophy (enlargement of calf and deltoid muscles), low endurance, and difficulties in standing unaided or inability to ascend staircases. As the condition progresses, muscle tissue experiences wasting and is eventually replaced by fat and fibrotic tissue (fibrosis). By age 10, braces may be required to aid in walking but most patients are wheelchair dependent by age 12. Later symptoms may include abnormal bone development that lead to skeletal deformities, including curvature of the spine. Due to progressive deterioration of muscle, loss of movement occurs, eventually leading to paralysis. Intellectual impairment may or may not be present but if present, does not progressively worsen as the child ages. The average life expectancy for males afflicted with DMD is around 25.

[0045] The main symptom of Duchenne muscular dystrophy, a progressive neuromuscular disorder, is muscle weakness associated with muscle wasting with the voluntary muscles being first affected, especially those of the hips, pelvic area, thighs, shoulders, and calves. Muscle weakness also occurs later, in the arms, neck, and other areas. Calves are often enlarged. Symptoms usually appear before age 6 and may appear in early infancy. Other physical symptoms are:
[0046] Awkward manner of walking, stepping, or running—(patients tend to walk on their forefeet, because of an increased calf muscle tone. Also, toe walking is a compensatory adaptation to knee extensor weakness.)
[0047] Frequent falls
[0048] Fatigue
[0049] Difficulty with motor skills (running, hopping, jumping)
[0050] Lumbar hyperlordosis, possibly leading to shortening of the hip-flexor muscles. This has an effect on overall posture and a manner of walking, stepping, or running.
[0051] Muscle contractures of Achilles tendon and hamstrings impair functionality because the muscle fibers shorten and fibrose in connective tissue
[0052] Progressive difficulty walking
[0053] Muscle fiber deformities
[0054] Pseudohypertrophy (enlarging) of tongue and calf muscles. The muscle tissue is eventually replaced by fat and connective tissue, hence the term pseudohypertrophy.
[0055] Higher risk of neurobehavioral disorders (e.g., ADHD), learning disorders (dyslexia), and non-progressive weaknesses in specific cognitive skills (in particular short-term verbal memory), which are believed to be the result of absent or dysfunctional dystrophin in the brain.
[0056] Eventual loss of ability to walk (usually by the age of 12)
[0057] Skeletal deformities (including scoliosis in some cases)
[0058] Trouble getting up from lying or sitting position
   The condition can often be observed clinically from the moment the patient takes his first steps, and the ability to walk usually completely disintegrates between the time the patient is 9 to 12 years of age. Most men affected with DMD become essentially “paralyzed from the neck down” by the age of 21. Muscle wasting begins in the legs and pelvis, then progresses to the muscles of the shoulders and neck, followed by loss of arm muscles and respiratory muscles. Calf muscle enlargement (pseudohypertrophy) is quite obvious. Cardiomyopathy particularly (dilated cardiomyopathy) is common, but the development of congestive heart failure or arrhythmia (irregular heartbeat) is only occasional.

[0059] A positive Gowers' sign reflects the more severe impairment of the lower extremities muscles. The child helps himself to get up with upper extremities: first by rising to stand on his arms and knees, and then “walking” his hands up his legs to stand upright. Affected children usually tire more easily and have less overall strength than their peers. Creatine kinase (CPK-MM) levels in the bloodstream are extremely high. An electromyography (EMG) shows that weakness is caused by destruction of muscle tissue rather than by damage to nerves. Genetic testing can reveal genetic errors in the Xp21 gene. A muscle biopsy (immunohistochemistry or immunoblotting) or genetic test (blood test) confirms the absence of dystrophin, although improvements in genetic testing often make this unnecessary.

[0060] Other symptoms include:
[0061] Abnormal heart muscle (cardiomyopathy)
[0062] Congestive heart failure or irregular heart rhythm (arrhythmia)
[0063] Deformities of the chest and back (scoliosis)
[0064] Enlarged muscles of the calves, buttocks, and shoulders (around age 4 or 5). These muscles are eventually replaced by fat and connective tissue (pseudohypertrophy).
[0065] Loss of muscle mass (atrophy)
[0066] Muscle contractures in the heels, legs
[0067] Muscle deformities
[0068] Respiratory disorders, including pneumonia and swallowing with food or fluid passing into the lungs (in late stages of the disease)

[0069] C. Causes

[0070] Duchenne muscular dystrophy (DMD) is caused by a mutation of the dystrophin gene at locus Xp21, located on the short arm of the X chromosome. Dystrophin is responsible for connecting the cytoskeleton of each muscle fiber to the underlying basal lamina (extracellular matrix), through a protein complex containing many subunits. The absence of dystrophin permits excess calcium to penetrate the sarcolemma (the cell membrane). Alterations in calcium and signaling pathways cause water to enter into the mitochondria, which then burst.

[0071] In skeletal muscle dystrophy, mitochondrial dysfunction gives rise to an amplification of stress-induced cytosolic calcium signals and an amplification of stress-induced reactive-oxygen species (ROS) production. In a complex cascading process that involves several pathways and is not clearly understood, increased oxidative stress within the cell damages the sarcolemma and eventually results in the death of the cell. Muscle fibers undergo necrosis and are ultimately replaced with adipose and connective tissue.

[0072] DMD is inherited in an X-linked recessive pattern. Females will typically be carriers for the disease while males will be affected. Typically, a female carrier will be unaware they carry a mutation until they have an affected son. The son of a carrier mother has a 50% chance of inheriting the defective gene from his mother. The daughter of a carrier mother has a 50% chance of being a carrier and a 50% chance of having two normal copies of the gene. In all cases, an unaffected father will either pass a normal Y to his son or a normal X to his daughter. Female carriers of an X-linked recessive condition, such as DMD, can show symptoms depending on their pattern of X-inactivation.

[0073] Exon deletions preceding exon 51 of the human DMD gene, which disrupt the open reading frame (ORF) by juxtaposing out of frame exons, represent the most common type of human DMD mutation. Skipping of exon 51 can, in principle, restore the DMD ORF in 13% of DMD patients with exon deletions.

[0074] Duchenne muscular dystrophy has an incidence of 1 in 5000 male infants. Mutations within the dystrophin gene can either be inherited or occur spontaneously during germline transmission. An exemplary but non-limiting mutation is deletion of exons 8 and 9 and a corresponding iPSC model is ΔEx8-9 iDMD and a mouse model is ΔEx8-9 DMD.

[0075] D. Diagnosis

[0076] Genetic counseling is advised for people with a family history of the disorder. Duchenne muscular dystrophy can be detected with about 95% accuracy by genetic studies performed during pregnancy.

[0077] DNA Test.

[0078] The muscle-specific isoform of the dystrophin gene is composed of 79 exons, and DNA testing and analysis can usually identify the specific type of mutation of the exon or exons that are affected. DNA testing confirms the diagnosis in most cases.

[0079] Muscle Biopsy.

[0080] If DNA testing fails to find the mutation, a muscle biopsy test may be performed. A small sample of muscle tissue is extracted (usually with a scalpel instead of a needle) and a dye is applied that reveals the presence of dystrophin. Complete absence of the protein indicates the condition.

[0081] Over the past several years DNA tests have been developed that detect more of the many mutations that cause the condition, and muscle biopsy is not required as often to confirm the presence of Duchenne's.

[0082] Prenatal Tests.

[0083] DMD is carried by an X-linked recessive gene. Males have only one X chromosome, so one copy of the mutated gene will cause DMD. Fathers cannot pass X-linked traits on to their sons, so the mutation is transmitted by the mother.

[0084] If the mother is a carrier, and therefore one of her two X chromosomes has a DMD mutation, there is a 50% chance that a female child will inherit that mutation as one of her two X chromosomes, and be a carrier. There is a 50% chance that a male child will inherit that mutation as his one X chromosome, and therefore have DMD.

[0085] Prenatal tests can tell whether an unborn child has the most common mutations. There are many mutations responsible for DMD, and some have not been identified, so genetic testing only works when family members with DMD have a mutation that has been identified.

[0086] Prior to invasive testing, determination of the fetal sex is important; while males are sometimes affected by this X-linked disease, female DMD is extremely rare. This can be achieved by ultrasound scan at 16 weeks or more recently by free fetal DNA testing. Chorion villus sampling (CVS) can be done at 11-14 weeks, and has a 1% risk of miscarriage. Amniocentesis can be done after 15 weeks, and has a 0.5% risk of miscarriage. Fetal blood sampling can be done at about 18 weeks. Another option in the case of unclear genetic test results is fetal muscle biopsy.

[0087] E. Treatment

[0088] There is no current cure for DMD, and an ongoing medical need has been recognized by regulatory authorities. Phase 1-2a trials with exon skipping treatment for certain mutations have halted decline and produced small clinical improvements in walking. Treatment is generally aimed at controlling the onset of symptoms to maximize the quality of life, and include the following:
[0089] Corticosteroids such as prednisolone and deflazacort increase energy and strength and defer severity of some symptoms.
[0090] Randomized control trials have shown that beta-2-agonists increase muscle strength but do not modify disease progression. Follow-up time for most RCTs on beta2-agonists is only around 12 months and hence results cannot be extrapolated beyond that time frame.
[0091] Mild, non-jarring physical activity such as swimming is encouraged. Inactivity (such as bed rest) can worsen the muscle disease.
[0092] Physical therapy is helpful to maintain muscle strength, flexibility, and function.
[0093] Orthopedic appliances (such as braces and wheelchairs) may improve mobility and the ability for self-care. Form-fitting removable leg braces that hold the ankle in place during sleep can defer the onset of contractures.
[0094] Appropriate respiratory support as the disease progresses is important.
   Comprehensive multi-disciplinary care standards/guidelines for DMD have been developed by the Centers for Disease Control and Prevention (CDC), and were published in two parts and are available at world-wide-web at treat-nmd.eu/dmd/care/diagnosis-management-DMD.

[0095] DMD generally progresses through five stages, as outlined in Bushby et al., Lancet Neurol., 9(1): 77-93 (2010) and Bushby et al., Lancet Neurol., 9(2): 177-198 (2010), incorporated by reference in their entireties. During the presymptomatic stage, patients typically show developmental delay, but no gait disturbance. During the early ambulatory stage, patients typically show the Gowers' sign, waddling gait, and toe walking. During the late ambulatory stage, patients typically exhibit an increasingly labored gait and begin to lose the ability to climb stairs and rise from the floor. During the early non-ambulatory stage, patients are typically able to self-propel for some time, are able to maintain posture, and may develop scoliosis. During the late non-ambulatory stage, upper limb function and postural maintenance is increasingly limited.

[0096] In some embodiments, treatment is initiated in the presymptomatic stage of the disease. In some embodiments, treatment is initiated in the early ambulatory stage. In some embodiments, treatment is initiated in the late ambulatory stage. In embodiments, treatment is initiated during the early non-ambulatory stage. In embodiments, treatment is initiated during the late non-ambulatory stage.

[0097] 1. Physical Therapy

[0098] Physical therapists are concerned with enabling patients to reach their maximum physical potential. Their aim is to:
[0099] minimize the development of contractures and deformity by developing a program of stretches and exercises where appropriate
[0100] anticipate and minimize other secondary complications of a physical nature by recommending bracing and durable medical equipment
[0101] monitor respiratory function and advise on techniques to assist with breathing exercises and methods of clearing secretions

[0102] 2. Respiration Assistance

[0103] Modem “volume ventilators/respirators,” which deliver an adjustable volume (amount) of air to the person with each breath, are valuable in the treatment of people with muscular dystrophy related respiratory problems. The ventilator may require an invasive endotracheal or tracheotomy tube through which air is directly delivered, but, for some people non-invasive delivery through a face mask or mouthpiece is sufficient. Positive airway pressure machines, particularly bi-level ones, are sometimes used in this latter way. The respiratory equipment may easily fit on a ventilator tray on the bottom or back of a power wheelchair with an external battery for portability.

[0104] Ventilator treatment may start in the mid to late teens when the respiratory muscles can begin to collapse. If the vital capacity has dropped below 40% of normal, a volume ventilator/respirator may be used during sleeping hours, a time when the person is most likely to be under ventilating (“hypoventilating”). Hypoventilation during sleep is determined by a thorough history of sleep disorder with an oximetry study and a capillary blood gas. A cough assist device can help with excess mucus in lungs by hyperinflation of the lungs with positive air pressure, then negative pressure to get the mucus up. If the vital capacity continues to decline to less than 30 percent of normal, a volume ventilator/respirator may also be needed during the day for more assistance. The person gradually will increase the amount of time using the ventilator/respirator during the day as needed.

[0105] F. Prognosis

[0106] Duchenne muscular dystrophy is a progressive disease which eventually affects all voluntary muscles and involves the heart and breathing muscles in later stages. The life expectancy is currently estimated to be around 25, but this varies from patient to patient. Recent advancements in medicine are extending the lives of those afflicted. The Muscular Dystrophy Campaign, which is a leading UK charity focusing on all muscle disease, states that “with high standards of medical care young men with Duchenne muscular dystrophy are often living well into their 30s.”

[0107] In rare cases, persons with DMD have been seen to survive into the forties or early fifties, with the use of proper positioning in wheelchairs and beds, ventilator support (via tracheostomy or mouthpiece), airway clearance, and heart medications, if required. Early planning of the required supports for later-life care has shown greater longevity in people living with DMD.

[0108] Curiously, in the mdx mouse model of Duchenne muscular dystrophy, the lack of dystrophin is associated with increased calcium levels and skeletal muscle myonecrosis. The intrinsic laryngeal muscles (ILM) are protected and do not undergo myonecrosis. ILM have a calcium regulation system profile suggestive of a better ability to handle calcium changes in comparison to other muscles, and this may provide a mechanistic insight for their unique pathophysiological properties. The ILM may facilitate the development of novel strategies for the prevention and treatment of muscle wasting in a variety of clinical scenarios.

### II. CRISPR SYSTEMS

[0109] A. CRISPRs

[0110] CRISPRs (clustered regularly interspaced short palindromic repeats) are DNA loci containing short repetitions of base sequences. Each repetition is followed by short segments of “spacer DNA” from previous exposures to a virus. CRISPRs are found in approximately 40% of sequenced eubacteria genomes and 90% of sequenced archaea. CRISPRs are often associated with Cas genes that code for proteins related to CRISPRs. The CRISPR/Cas system is a prokaryotic immune system that confers resistance to foreign genetic elements such as plasmids and phages and provides a form of acquired immunity. CRISPR spacers recognize and silence these exogenous genetic elements like RNAi in eukaryotic organisms.

[0111] CRISPR repeats range in size from 24 to 48 base pairs. They usually show some dyad symmetry, implying the formation of a secondary structure such as a hairpin, but are not truly palindromic. Repeats are separated by spacers of similar length. Some CRISPR spacer sequences exactly match sequences from plasmids and phages, although some spacers match the prokaryote's genome (self-targeting spacers). New spacers can be added rapidly in response to phage infection.

[0112] B. Cas Nucleases

[0113] CRISPR-associated (cas) genes are often associated with CRISPR repeat-spacer arrays. As of 2013, more than forty different Cas protein families had been described. Of these protein families, Cas1 appears to be ubiquitous among different CRISPR/Cas systems. Particular combinations of cas genes and repeat structures have been used to define 8 CRISPR subtypes (Ecoli, Ypest, Nmeni, Dvulg, Tneap, Hmari, Apem, and Mtube), some of which are associated with an additional gene module encoding repeat-associated mysterious proteins (RAMPs). More than one CRISPR subtype may occur in a single genome. The sporadic distribution of the CRISPR/Cas subtypes suggests that the system is subject to horizontal gene transfer during microbial evolution.

[0114] Exogenous DNA is apparently processed by proteins encoded by Cas genes into small elements (˜30 base pairs in length), which are then somehow inserted into the CRISPR locus near the leader sequence. RNAs from the CRISPR loci are constitutively expressed and are processed by Cas proteins to small RNAs composed of individual, exogenously-derived sequence elements with a flanking repeat sequence. The RNAs guide other Cas proteins to silence exogenous genetic elements at the RNA or DNA level. Evidence suggests functional diversity among CRISPR subtypes. The Cse (Cas subtype Ecoli) proteins (called CasA-E in E. coli) form a functional complex, Cascade, that processes CRISPR RNA transcripts into spacer-repeat units that Cascade retains. In other prokaryotes, Cas6 processes the CRISPR transcripts. Interestingly, CRISPR-based phage inactivation in E. coli requires Cascade and Cas3, but not Cas1 and Cas2. The Cmr (Cas RAMP module) proteins found in Pyrococcus furiosus and other prokaryotes form a functional complex with small CRISPR RNAs that recognizes and cleaves complementary target RNAs. RNA-guided CRISPR enzymes are classified as type V restriction enzymes.

[0115] Cas9 is a nuclease, an enzyme specialized for cutting DNA, with two active cutting sites, one for each strand of the double helix. The team demonstrated that they could disable one or both sites while preserving Cas9's ability to locate its target DNA. TracrRNA and spacer RNA can be combined into a “single-guide RNA” molecule that, mixed with Cas9, can find and cut the correct DNA targets, and such synthetic guide RNAs are able to be used for gene editing.

[0116] Cas9 proteins are highly enriched in pathogenic and commensal bacteria. CRISPR/Cas-mediated gene regulation may contribute to the regulation of endogenous bacterial genes, particularly during bacterial interaction with eukaryotic hosts. For example, Cas protein Cas9 of Francisella novicida uses a unique, small, CRISPR/Cas-associated RNA (scaRNA) to repress an endogenous transcript encoding a bacterial lipoprotein that is critical for F. novicida to dampen host response and promote virulence. One group showed that coinjection of Cas9 mRNA and sgRNAs into the germline (zygotes) generated nice with mutations. Delivery of Cas9 DNA sequences also is contemplated.

[0117] The systems CRISPR/Cas are separated into three classes. Class 1 uses several Cas proteins together with the CRISPR RNAs (crRNA) to build a functional endonuclease. Class 2 CRISPR systems use a single Cas protein with a crRNA. Cpf1 has been recently identified as a Class II, Type V CRISPR/Cas systems containing a 1,300 amino acid protein. See also U.S. Patent Publication 2014/0068797, which is incorporated by reference in its entirety.

[0118] In some embodiments, the compositions of the disclosure include a small version of a Cas9 from the bacterium Staphylococcus aureus (UniProt Accession No. J7RUA5). The small version of the Cas9 provides advantages over wild type or full length Cas9. In some embodiments the Cas9 is a spCas9 (AddGene).

[0119] C. Cpf1 Nucleases

[0120] Clustered Regularly Interspaced Short Palindromic Repeats from Prevotella and Francisella 1 or CRISPR/Cpf1 is a DNA-editing technology which shares some similarities with the CRISPR/Cas9 system. Cpf1 is an RNA-guided endonuclease of a class II CRISPR/Cas system. This acquired immune mechanism is found in Prevotella and Francisella bacteria. It prevents genetic damage from viruses. Cpf1 genes are associated with the CRISPR locus, coding for an endonuclease that use a guide RNA to find and cleave viral DNA. Cpf1 is a smaller and simpler endonuclease than Cas9, overcoming some of the CRISPR/Cas9 system limitations.

[0121] Cpf1 appears in many bacterial species. The ultimate Cpf1 endonuclease that was developed into a tool for genome editing was taken from one of the first 16 species known to harbor it.

[0122] In embodiments, the Cpf1 is a Cpf1 enzyme from Acidaminococcus (species BV3L6, UniProt Accession No. U2UMQ6; SEQ ID NO. 75), having the sequence set forth below:

| | |
|---|---|
| 1 | MTQFEGFTNL YQVSKTLRFE LIPQGKTLKH IQEQGFIEED KARNDHYKEL KPIIDRIYKT |
| 61 | YADQCLQLVQ LDWENLSAAI DSYRKEKTEE TRNALIEEQA TYRNAIHDYF IGRTDNLTDA |
| 121 | INKRHAEIYK GLFKAELFNG KVLKQLGTVT TTEHENALLR SFDKFTTYFS GFYENRKNVF |
| 181 | SAEDISTAIP HRIVQDNFPK FKENCHIFTR LITAVPSLRE HFENVKKAIG IFVSTSIEEV |
| 241 | FSFPFYNQLL TQTQIDLYNQ LLGGISREAG TEKIKGLNEV LNLAIQKNDE TAHIIASLPH |
| 301 | RFIPLFKQIL SDRNTLSFIL EEFKSDEEVI QSFCKYKTLL RNENVLETAE ALFNELNSID |
| 361 | LTHIFISHKK LETISSALCD HWDTLRNALY ERRISELTGK ITKSAKEKVQ RSLKHEDINL |
| 421 | QEIISAAGKE LSEAFKQKTS EILSHAHAAL DQPLPTTLKK QEEKEILKSQ LDSLLGLYHL |
| 481 | LDWFAVDESN EVDPEFSARL TGIKLEMEPS LSFYNKARNY ATKKPYSVEK FKLNFQMPTL |
| 541 | ASGWDVNKEK NNGAILFVKN GLYYLGIMPK QKGRYKALSF EPTEKTSEGF DKMYYDYFPD |
| 601 | AAKMIPKCST QLKAVTAHFQ THTTPILLSN NFIEPLEITK EIYDLNNPEK EPKKFQTAYA |
| 661 | KKTGDQKGYR EALCKWIDFT RDFLSKYTKT TSIDLSSLRP SSQYKDLGEY YAELNPLLYH |
| 721 | ISFQRIAEKE IMDAVETGKL YLFQIYNKDF AKGHHGKPNL HTLYWTGLFS PENLAKTSIK |
| 781 | LNGQAELFYR PKSRMKRMAH RLGEKMLNKK LKDQKTPIPD TLYQELYDYV NHRLSHDLSD |
| 841 | EARALLPNVI TKEVSHEIIK DRRFTSDKFF FHVPITLNYQ AANSPSKFNQ RVNAYLKEHP |
| 901 | ETPIIGIDRG ERNLIYITVI DSTGKILEQR SLNTIQQFDY QKKLDNREKE RVAARQAWSV |
| 961 | VGTIKDLKQG YLSQVIHEIV DLMIHYQAVV VLENLNFGFK SKRTGIAEKA VYQQFEKMLI |
| 1021 | DKLNCLVLKD YPAEKVGGVL NPYQLTDQFT SFAKMGTQSG FLFYVPAPYT SKIDPLTGFV |
| 1081 | DPFVWKTIKN HESRKHFLEG FDFLHYDVKT GDFILHFKMN RNLSFQRGLP GFMPAWDIVF |
| 1141 | EKNETQFDAK GTPFIAGKRI VPVIENHRFT GRYRDLYPAN ELIALLEEKG IVFRDGSNIL |
| 1201 | PKLLENDDSH AIDTMVALIR SVLQMRNSNA ATGEDYINSP VRDLNGVCFD SRFQNPEWPM |
| 1261 | DADANGAYHI ALKGQLLLNH LKESKDLKLQ NGISNQDWLA YIQELRN |

[0123] In some embodiments, the Cpf1 is a Cpf1 enzyme from Lachnospiraceae (species ND2006, UniProt Accession No. AOA182DWE3; SEQ ID NO. 76), having the sequence set forth below:

| | |
|---|---|
| 1 | AASKLEKFTN CYSLSKTLRF KAIPVGKTQE NIDNKRLLVE DEKRAEDYKG VKKLLDRYYL |
| 61 | SFINDVLHSI KLKNLNNYIS LFRKKTRTEK ENKELENLEI NLRKEIAKAF KGAAGYKSLF |
| 121 | KKDIIETILP EAADDKDEIA LVNSFNGFTT AFTGFFDNRE NMFSEEAKST SIAFRCINEN |
| 181 | LTRYISNMDI FEKVDAIFDK HEVQEIKEKI LNSDYDVEDF FEGEFFNFVL TQEGIDVYNA |
| 241 | IIGGFVTESG EKIKGLNEYI NLYNAKTKQA LPKFKPLYKQ VLSDRESLSF YGEGYTSDEE |
| 301 | VLEVFRNTLN KNSEIFSSIK KLEKLFKNFD EYSSAGIFVK NGPAISTISK DIFGEWNLIR |
| 361 | DKWNAEYDDI HLKKKAVVTE KYEDDRRKSF KKIGSFSLEQ LQEYADADLS VVEKLKEIII |
| 421 | QKVDEIYKVY GSSEKLFDAD FVLEKSLKKN DAVVAIMKDL LDSVKSFENY IKAFFGEGKE |
| 481 | TNRDESFYGD FVLAYDILLK VDHIYDAIRN YVTQKPYSKD KFKLYFQNPQ FMGGWDKDKE |
| 541 | TDYRATILRY GSKYYLAIMD KKYAKCLQKI DKDDVNGNYE KINYKLLPGP NKMLPKVFFS |
| 601 | KKWMAYYNPS EDIQKIYKNG TFKKGDMFNL NDCHKLIDFF KDSISRYPKW SNAYDFNFSE |
| 661 | TEKYKDIAGF YREVEEQGYK VSFESASKKE VDKLVEEGKL YMFQIYNKDF SDKSHGTPNL |
| 721 | HTMYFKLLFD ENNHGQIRLS GGAELFMRRA SLKKEELVVH PANSPIANKN PDNPKKTTTL |
| 781 | SYDVYKDKRF SEDQYELHIP IAINKCPKNI FKINTEVRVL LKHDDNPYVI GIDRGERNLL |
| 841 | YIVVVDGKGN IVEQYSLNEI INNFNGIRIK TDYHSLLDKK EKERFEARQN WTSIENIKEL |
| 901 | KAGYISQVVH KICELVEKYD AVIALEDLNS GFKNSRVKVE KQVYQKFEKM LIDKLNYMVD |
| 961 | KKSNPCATGG ALKGYQITNK FESFKSMSTQ NGFIFYIPAW LTSKIDPSTG FVNLLKTKYT |
| 1021 | SIADSKKFIS SFDRIMYVPE EDLFEFALDY KNFSRTDADY IKKWKLYSYG NRIRIFAAAK |
| 1081 | KNNVFAWEEV CLTSAYKELF NKYGINYQQG DIRALLCEQS DKAFYSSFMA LMSLMLQMRN |
| 1141 | SITGRTDVDF LISPVKNSDG IFYDSRNYEA QENAILPKNA DANGAYNIAR KVLWAIGQFK |
| 1201 | KAEDEKLDKV KIAISNKEWL EYAQTSVK |

[0124] In some embodiments, the Cpf1 is codon optimized for expression in mammalian cells. In some embodiments, the Cpf1 is codon optimized for expression in human cells or mouse cells.

[0125] The Cpf1 locus contains a mixed alpha/beta domain, a RuvC-I followed by a helical region, a RuvC-II and a zinc finger-like domain. The Cpf1 protein has a RuvC-like endonuclease domain that is similar to the RuvC domain of Cas9. Furthermore, Cpf1 does not have a HNH endonuclease domain, and the N-terminal of Cpf1 does not have the alpha-helical recognition lobe of Cas9.

[0126] Cpf1 CRISPR-Cas domain architecture shows that Cpf1 is functionally unique, being classified as Class 2, type V CRISPR system. The Cpf1 loci encode Cas1, Cas2 and Cas4 proteins more similar to types I and III than from type II systems. Database searches suggest the abundance of Cpf1-family proteins in many bacterial species.

[0127] Functional Cpf1 doesn't does not require a tracrRNA. Therefore, functional Cpf1 gRNAs of the disclosure may comprise or consist of a crRNA. This benefits genome editing because Cpf1 is not only a smaller than Cas9, but also it has a smaller sgRNA molecule (approximately half as many nucleotides as Cas9).

[0128] The Cpf1-gRNA (e.g., Cpf1-crRNA) complex cleaves target DNA or RNA by identification of a protospacer adjacent motif 5′-YTN-3′ (where “Y” is a pyrimidine and “N” is any nucleobase) or 5′-TTN-3′, in contrast to the G-rich PAM targeted by Cas9. After identification of PAM, Cpf1 introduces a sticky-end-like DNA double-stranded break of 4 or 5 nucleotides overhang.

[0129] The CRISPR/Cpf1 system comprises or consists of a Cpf1 enzyme and a guide RNA that finds and positions the complex at the correct spot on the double helix to cleave target DNA. In its native bacterial hosts, CRISPR/Cpf1 systems activity has three stages:
[0130] Adaptation, during which Cas1 and Cas2 proteins facilitate the adaptation of small fragments of DNA into the CRISPR array;
[0131] Formation of crRNAs: processing of pre-cr-RNAs producing of mature crRNAs to guide the Cas protein; and
[0132] Interference, in which the Cpf1 is bound to a crRNA to form a binary complex to identify and cleave a target DNA sequence.

[0133] This system has been modified to utilize non-naturally occurring crRNAs, which guide Cpf1 to a desired target sequence in a non-bacterial cell, such as a mammalian cell.

[0134] B. gRNA

[0135] As an RNA guided protein, Cas9 requires a short RNA to direct the recognition of DNA targets. Though Cas9 preferentially interrogates DNA sequences containing a PAM sequence NGG it can bind here without a protospacer target. However, the Cas9-gRNA complex requires a close match to the gRNA to create a double strand break. CRISPR sequences in bacteria are expressed in multiple RNAs and then processed to create guide strands for RNA. Because Eukaryotic systems lack some of the proteins required to process CRISPR RNAs the synthetic construct gRNA was created to combine the essential pieces of RNA for Cas9 targeting into a single RNA expressed with the RNA polymerase type III promoter U6. Synthetic gRNAs are slightly over 100 bp at the minimum length and contain a portion which targets the 20 protospacer nucleotides immediately preceding the PAM sequence NGG; gRNAs do not contain a PAM sequence.

[0136] In some embodiments, a gRNA targets a site within a wildtype dystrophin gene. In some embodiments, a gRNA targets a site within a mutant dystrophin gene. In some embodiments, a gRNA targets a dystrophin intron. In some embodiments, a gRNA targets a dystrophin exon. In some embodiments, a gRNA targets a site in a dystrophin exon that is expressed and is present in one or more of the dystrophin isoforms shown in Table 3. In some embodiments, a gRNA targets a site in a dystrophin exon that is within the ABD-1 domain of dystrophin. In embodiments, a gRNA targets a dystrophin splice site. In some embodiments, a gRNA targets a splice donor site on the dystrophin gene. In embodiments, a gRNA targets a splice acceptor site on the dystrophin gene.

[0137] In embodiments, more than one guide RNAs are used to edit a dystrophin gene. In some embodiments, 2, 3, 4, 5, 6, 7, 8, 9, or 10 guide RNAs are used to edit a dystrophin gene. In particular embodiments, two guide RNAs are used to edit a dystrophin gene.

[0138] In some embodiments, a first guide RNA targets a first genomic target sequence, and a second guide RNA targets a second genomic target sequence. In some embodiments, the first genomic target sequence and the second genomic target sequence may both be in an intronic region of the dsyrophin gene. In other embodiments, the first genomic target sequence and the second genomic target sequence may both be in an exonic region of the dsyrophin gene. In some embodiments, the first genomic target sequence is an intronic region of the dystropin gene, and the second genomic target sequence is in an exonic region of the dystrophin gene. In some embodiments, the genomic target sequence may be within intron 2, 3, 4, 5, 6, 7, 8, 9, 10, or 11 of dystrophin. In some embodiments, the genomic target sequence may be within exon 2, 3, 4, 5, 6, 7, 8, 9, 10, or 11 of dystrophin.

[0139] One or more guide RNAs may be used to edit the Actin Binding Domain-1 region of the dystrophin protein, encoded by exons 2-8 (amino acids 14-240 of SEQ ID NO: 74). For example, a guide RNA may target any one of exons 2-8, such as exon 2, 3, 4, 5, 6, 7 or 8. In some embodiments, a guide RNA may target any one of introns 2-9, such as intron 2, 3, 4, 5, 6, 7, 8, or 9. In some embodiments, a first guide RNA targets any one of exons 2-8, and a second guide RNA targets any one of exons 2-8. In some embodiments, a first guide RNA targets any one of introns 2-9, and a second guide RNA targets any one of introns 2-9. In some embodiments, a first guide RNA targets any one of introns 2-9, and a second guide RNA targets any one of exons 2-8. In some embodiments, a first guide RNA and a second guide RNA target the introns shown in Table 4, or the exons shown in Table 5, below. In these tables, an “x” indicates that the combination shown is contemplated by the instant disclosure.

TABLE 4
Combinations of Introns Targeted by First and Second gRNA

| | | Intron Targeted by First gRNA | | | | | | | |
|---|---|---|---|---|---|---|---|---|---|
| | | 2 | 3 | 4 | 5 | 6 | 7 | 8 | 9 |
| Intron | 2 | x | x | x | x | x | x | x | x |
| Targeted | 3 | x | x | x | x | x | x | x | x |
| by | 4 | x | x | x | x | x | x | x | x |
| Second | 5 | x | x | x | x | x | x | x | x |
| gRNA | 6 | x | x | x | x | x | x | x | x |
| | 7 | x | x | x | x | x | x | x | x |
| | 8 | x | x | x | x | x | x | x | x |
| | 9 | x | x | x | x | x | x | x | x |

TABLE 5
Combinations of Exons Targeted by First and Second gRNA

Exon Targeted by First gRNA

| | | 2 | 3 | 4 | 5 | 6 | 7 | 8 |
|---|---|---|---|---|---|---|---|---|
| Exon | 2 | x | x | x | x | x | x | x |
| Targeted | 3 | x | x | x | x | x | x | x |
| by | 4 | x | x | x | x | x | x | x |
| Second | 5 | x | x | x | x | x | x | x |
| gRNA | 6 | x | x | x | x | x | x | x |
| | 7 | x | x | x | x | x | x | x |
| | 8 | x | x | x | x | x | x | x |

[0140] In some embodiments, a first gRNA targets intron 2 and a second gRNA targets intron 7. In some embodiments, a first gRNA targets intron 5 and a second gRNA targets intron 7. In some embodiments, a first gRNA targets intron 2 and a second gRNA targets intron 9. In some embodiments, a first gRNA targets intron 7 and a second gRNA targets intron 9.

[0141] In some embodiments, a first genomic target sequence is located within intron 2 and a second genomic target sequence is located within intron 7. In some embodiments, a first genomic target sequence is located within intron 5 and a second genomic target sequence is located within intron 7. In some embodiments, a first genomic target sequence is located within intron 2 and a second genomic target sequence is located within intron 9. In some embodiments, a first genomic target sequence is located within intron 7 and a second genomic target sequence is located within intron 9.

[0142] In some embodiments, one or more gRNAs are used to delete one or more of exons 2-8. For example, a first gRNA may be targeted to a sequence in an intron 5′ to the one or more exons, and a second gRNA may be targeted to a sequence in an intron 3′ to the one or more exons. In the presence of a nuclease (e.g., Cas9 nuclease), the one or more gRNAs cause excision of the one or more exons. In some embodiments, exons 3-7 are deleted. In some embodiments, exons 6-7 are deleted.

[0143] Suitable gRNAs for use in various compositions and methods disclosed herein are provided as SEQ ID NOs. 6 to 10. (Table 1). In preferred embodiments, the gRNA is selected from any one of SEQ ID NO. 6 to SEQ ID NO. 10.

[0144] In some embodiments, gRNAs of the disclosure comprise a sequence that is complementary to a target sequence within a coding sequence or a non-coding sequence corresponding to the DMD gene, and, therefore, hybridize to the target sequence.

[0145] In some embodiments, gRNAs for Cpf1 comprise a single crRNA containing a direct repeat scaffold sequence followed by 24 nucleotides of guide sequence. In some embodiments, a “guide” sequence of the crRNA comprises a sequence of the gRNA that is complementary to a target sequence. In some embodiments, crRNA of the disclosure comprises a sequence of the gRNA that is not complementary to a target sequence. “Scaffold” sequences of the disclosure link the gRNA to the Cpf1 polypeptide. “Scaffold” sequences of the disclosure are not equivalent to a tracrRNA sequence of a gRNA-Cas9 construct.

[0146] E. Cas9 versus Cpf1

[0147] Cas9 requires two RNA molecules to cut DNA while Cpf1 needs one. The proteins also cut DNA at different places, offering researchers more options when selecting an editing site. Cas9 cuts both strands in a DNA molecule at the same position, leaving behind ‘blunt’ ends. Cpf1 leaves one strand longer than the other, creating ‘sticky’ ends that are easier to work with. Cpf1 appears to be more able to insert new sequences at the cut site, compared to Cas9. Although the CRISPR/Cas9 system can efficiently disable genes, it is challenging to insert genes or generate a knock-in. Cpf1 lacks tracrRNA, utilizes a T-rich PAM and cleaves DNA via a staggered DNA DSB.

[0148] In summary, important differences between Cpf1 and Cas9 systems are that Cpf1 recognizes different PAMs, enabling new targeting possibilities, creates 4-5 nt long sticky ends, instead of blunt ends produced by Cas9, enhancing the efficiency of genetic insertions and specificity during NHEJ or HDR, and cuts target DNA further away from PAM, further away from the Cas9 cutting site, enabling new possibilities for cleaving the DNA.

| Feature | Cas9 | Cpf1 |
|---|---|---|
| Structure | Two RNA required (Or 1 fusion | One RNA required |
| | transcript (crRNA + tracrRNA = | |
| | gRNA) | |
| Cutting | Blunt end cuts | Staggered end cuts |
| mechanism | | |
| Cutting site | Proximal to recognition site | Distal from recognition |
| | | site |
| Target sites | G-rich PAM | T-rich PAM |
| Cell type | Fast growing cells, including | Non-dividing cells, |
| | cancer cells | including nerve cells |

[0149] F. CRISPR/Cpf1-Mediated Gene Editing

[0150] The first step in editing the DMD gene using CRISPR/Cpf1 is to identify the genomic target sequence. The genomic target for the gRNAs of the disclosure can be any ˜24 nucleotide DNA sequence within the dystrophin gene, provided that the sequence is unique compared to the rest of the genome.

[0151] The next step in editing the DMD gene using CRISPR/Cpf1 is to identify all Protospacer Adjacent Motif (PAM) sequences within the genetic region to be targeted. Cpf1 utilizes a T-rich PAM sequence (TTTN, wherein N is any nucleotide). The target sequence must be immediately upstream of a PAM. Once all possible PAM sequences and putative target sites have been identified, the next step is to choose which site is likely to result in the most efficient on-target cleavage. The gRNA targeting sequence needs to match the target sequence, and the gRNA targeting sequence must not match additional sites within the genome. In preferred embodiments, the gRNA targeting sequence has perfect homology to the target with no homology elsewhere in the genome. In some embodiments, a given gRNA targeting sequence will have additional sites throughout the genome where partial homology exists. These sites are called “off-targets” and should be considered when designing a gRNA. In general, off-target sites are not cleaved as efficiently when mismatches occur near the PAM sequence, so gRNAs with no homology or those with mismatches close to the PAM sequence will have the highest specificity. In addition to “off-target activity”, factors that maximize cleavage of the desired target sequence (“on-target activity”) must be considered. It is known to those of skill in the art that two gRNA targeting sequences, each having 100% homology to the target DNA may not result in equivalent cleavage efficiency. In fact, cleavage efficiency may increase or decrease depending upon the specific nucleotides within the selected target sequence. Close examination of predicted on-target and off-target activity of each potential gRNA targeting sequence is necessary to design the best gRNA. Several gRNA design programs have been developed that are capable of locating potential PAM and target sequences and ranking the associated gRNAs based on their predicted on-target and off-target activity (e.g. CRISPRdirect, available at www.crispr.dbcls.jp).

[0152] The next step is to synthesize and clone desired gRNAs. Targeting oligos can be synthesized, annealed, and inserted into plasmids containing the gRNA scaffold using standard restriction-ligation cloning. However, the exact cloning strategy will depend on the gRNA vector that is chosen. The gRNAs for Cpf1 are notably simpler than the gRNAs for Cas9, and only consist of a single crRNA containing direct repeat scaffold sequence followed by ˜24 nucleotides of guide sequence. Cpf1 requires a minimum of 16 nucleotides of guide sequence to achieve detectable DNA cleavage, and a minimum of 18 nucleotides of guide sequence to achieve efficient DNA cleavage in vitro. In some embodiments, 20-24 nucleotides of guide sequence is used. The seed region of the Cpf1 gRNA is generally within the first 5 nucleotides on the 5′ end of the guide sequence. Cpf1 makes a staggered cut in the target genomic DNA. In AsCpf1 and LbCpf1, the cut occurs 19 bp after the PAM on the targeted (+) strand, and 23 bp on the other strand.

[0153] Each gRNA should then be validated in one or more target cell lines. For example, after the CRISPR and gRNA are delivered to the cell, the genomic target region may be amplified using PCR and sequenced according to methods known to those of skill in the art.

[0154] In some embodiments, gene editing may be performed in vitro or ex vivo. In some embodiments, cells are contacted in vitro or ex vivo with a Cpf1 and a gRNA that targets a dystrophin splice site. In some embodiments, the cells are contacted with one or more nucleic acids encoding the Cpf1 and the guide RNA. In some embodiments, the one or more nucleic acids are introduced into the cells using, for example, lipofection or electroporation. Gene editing may also be performed in zygotes. In embodiments, zygotes may be injected with one or more nucleic acids encoding Cpf1 and a gRNA that targets a dystrophin splice site. The zygotes may subsequently be injected into a host.

[0155] In embodiments, the Cpf1 is provided on a vector. In embodiments, the vector contains a Cpf1 sequence derived from a Lachnospiraceae bacterium. See, for example, Uniprot Accession No. AOA182DWE3; SEQ ID NO. 76. In embodiments, the vector contains a Cpf1 sequence derived from an Acidaminococcus bacterium. See, for example, Uniprot Accession No. U2UMQ6; SEQ ID NO. 75. In some embodiments, the Cpf1 sequence is codon optimized for expression in human cells or mouse cells. In some embodiments, the vector further contains a sequence encoding a fluorescent protein, such as GFP, which allows Cpf1-expressing cells to be sorted using fluorescence activated cell sorting (FACS). In some embodiments, the vector is a viral vector such as an adeno-associated viral vector.

[0156] In embodiments, the gRNA is provided on a vector. In some embodiments, the vector is a viral vector such as an adeno-associated viral vector. In embodiments, the Cpf1 and the guide RNA are provided on the same vector. In embodiments, the Cpf1 and the guide RNA are provided on different vectors.

[0157] In some embodiments, the cells are additionally contacted with a single-stranded DMD oligonucleotide to effect homology directed repair. In some embodiments, small INDELs restore the protein reading frame of dystrophin (“reframing” strategy). When the reframing strategy is used, the cells may be contacted with a single gRNA. In embodiments, a splice donor or splice acceptor site is disrupted, which results in exon skipping and restoration of the protein reading frame (“exon skipping” strategy). When the exon skipping strategy is used, the cells may be contacted with two or more gRNAs.

[0158] Efficiency of in vitro or ex vivo Cpf1-mediated DNA cleavage may be assessed using techniques known to those of skill in the art, such as the T7 E1 assay. Restoration of DMD expression may be confirmed using techniques known to those of skill in the art, such as RT-PCR, western blotting, and immunocytochemistry.

[0159] In some embodiments, in vitro or ex vivo gene editing is performed in a muscle or satellite cell. In some embodiments, gene editing is performed in iPSC or iCM cells. In embodiments, the iPSC cells are differentiated after gene editing. For example, the iPSC cells may be differentiated into a muscle cell or a satellite cell after editing. In embodiments, the iPSC cells are differentiated into cardiac muscle cells, skeletal muscle cells, or smooth muscle cells. In embodiments, the iPSC cells are differentiated into cardiomyocytes. iPSC cells may be induced to differentiate according to methods known to those of skill in the art.

[0160] In some embodiments, contacting the cell with the Cpf1 and the gRNA restores dystrophin expression. In embodiments, cells which have been edited in vitro or ex vivo, or cells derived therefrom, show levels of dystrophin protein that is comparable to wild type cells. In embodiments, the edited cells, or cells derived therefrom, express dystrophin at a level that is 50%, 60%, 70%, 80%, 90%, 95% or any percentage in between of wild type dystrophin expression levels. In embodiments, the cells which have been edited in vitro or ex vivo, or cells derived therefrom, have a mitochondrial number that is comparable to that of wild type cells. In embodiments the edited cells, or cells derived therefrom, have 50%, 60%, 70%, 80%, 90%, 95% or any percentage in between as many mitochondria as wild type cells. In embodiments, the edited cells, or cells derived therefrom, show an increase in oxygen consumption rate (OCR) compared to non-edited cells at baseline.

[0161] C. RNA Pol III and Pol III Promoters

[0162] In eukaryotes, RNA polymerase III (also called Pol III) transcribes DNA to synthesize ribosomal 5S rRNA, tRNA and other small RNAs. The genes transcribed by RNA Pol III fall in the category of “housekeeping” genes whose expression is required in all cell types and most environmental conditions. Therefore, the regulation of Pol III transcription is primarily tied to the regulation of cell growth and the cell cycle, thus requiring fewer regulatory proteins than RNA polymerase II. Under stress conditions however, the protein Maf1 represses Pol III activity.

[0163] In the process of transcription (by any polymerase) there are three main stages: (i) initiation, requiring construction of the RNA polymerase complex on the gene's promoter; (ii) elongation, the synthesis of the RNA transcript; and (iii) termination, the finishing of RNA transcription and disassembly of the RNA polymerase complex.

[0164] Promoters under the control of RNA Pol III include those for ribosomal 5S rRNA, tRNA and few other small RNAs such as U6 spliceosomal RNA, RNase P and RNase MRP RNA, 7SL RNA (the RNA component of the signal recognition particles), Vault RNAs, Y RNA, SINEs (short interspersed repetitive elements), 7SK RNA, two microRNAs, several small nucleolar RNAs and several few regulatory antisense RNAs

### III. NUCLEIC ACID DELIVERY

[0165] In some embodiments, one or more nucleic acids (e.g., an expression vector) are delivered to a cell. The cell may be a mammalian cell, for example a human cell, a mouse cell, or a dog cell. In some embodiments, the cell is an oocyte. In some embodiments, the cell is a non-human oocyte. In some embodiments the cell is a stem cell, such as an iPSC.

[0166] As discussed above, in certain embodiments, expression cassettes are employed to express a transcription factor product, either for subsequent purification and delivery to a cell/subject, or for use directly in a genetic-based delivery approach. Provided herein are expression vectors which contain one or more nucleic acids encoding Cpf1 and at least one DMD guide RNA that targets a dystrophin splice site. In some embodiments, a nucleic acid encoding Cpf1 and a nucleic acid encoding at least one guide RNA are provided on the same vector. In further embodiments, a nucleic acid encoding Cpf1 and a nucleic acid encoding least one guide RNA are provided on separate vectors.

[0167] Expression requires that appropriate signals be provided in the vectors, and include various regulatory elements such as enhancers/promoters from both viral and mammalian sources that drive expression of the genes of interest in cells. Elements designed to optimize messenger RNA stability and translatability in host cells also are defined. The conditions for the use of a number of dominant drug selection markers for establishing permanent, stable cell clones expressing the products are also provided, as is an element that links expression of the drug selection markers to expression of the polypeptide.

[0168] A. Regulatory Elements

[0169] Throughout this application, the term “expression cassette” is meant to include any type of genetic construct containing a nucleic acid coding for a gene product in which part or all of the nucleic acid encoding sequence is capable of being transcribed and translated, i.e., is under the control of a promoter. A “promoter” refers to a DNA sequence recognized by the synthetic machinery of the cell, or introduced synthetic machinery, required to initiate the specific transcription of a gene. The phrase “under transcriptional control” means that the promoter is in the correct location and orientation in relation to the nucleic acid to control RNA polymerase initiation and expression of the gene. An “expression vector” is meant to include expression cassettes comprised in a genetic construct that is capable of replication, and thus including one or more of origins of replication, transcription termination signals, poly-A regions, selectable markers, and multipurpose cloning sites.

[0170] The term promoter will be used here to refer to a group of transcriptional control modules that are clustered around the initiation site for RNA polymerase II. Much of the thinking about how promoters are organized derives from analyses of several viral promoters, including those for the HSV thymidine kinase (tk) and SV40 early transcription units. These studies, augmented by more recent work, have shown that promoters are composed of discrete functional modules, each consisting of approximately 7-20 bp of DNA, and containing one or more recognition sites for transcriptional activator or repressor proteins.

[0171] At least one module in each promoter functions to position the start site for RNA synthesis. The best known example of this is the TATA box, but in some promoters lacking a TATA box, such as the promoter for the mammalian terminal deoxynucleotidyl transferase gene and the promoter for the SV40 late genes, a discrete element overlying the start site itself helps to fix the place of initiation.

[0172] In some embodiments, the Cpf1 or Cas9 constructs of the disclosure are expressed by a muscle-cell specific promoter. This muscle-cell specific promoter may be constitutively active or may be an inducible promoter.

[0173] Additional promoter elements regulate the frequency of transcriptional initiation. Typically, these are located in the region 30-110 bp upstream of the start site, although a number of promoters have recently been shown to contain functional elements downstream of the start site as well. The spacing between promoter elements frequently is flexible, so that promoter function is preserved when elements are inverted or moved relative to one another. In the tk promoter, the spacing between promoter elements can be increased to 50 bp apart before activity begins to decline. Depending on the promoter, it appears that individual elements can function either co-operatively or independently to activate transcription.

[0174] In certain embodiments, viral promoters such as the human cytomegalovirus (CMV) immediate early gene promoter, the SV40 early promoter, the Rous sarcoma virus long terminal repeat, rat insulin promoter and glyceraldehyde-3-phosphate dehydrogenase can be used to obtain high-level expression of the coding sequence of interest. The use of other viral or mammalian cellular or bacterial phage promoters which are well-known in the art to achieve expression of a coding sequence of interest is contemplated as well, provided that the levels of expression are sufficient for a given purpose. By employing a promoter with well-known properties, the level and pattern of expression of the protein of interest following transfection or transformation can be optimized. Further, selection of a promoter that is regulated in response to specific physiologic signals can permit inducible expression of the gene product.

[0175] Enhancers are genetic elements that increase transcription from a promoter located at a distant position on the same molecule of DNA. Enhancers are organized much like promoters. That is, they are composed of many individual elements, each of which binds to one or more transcriptional proteins. The basic distinction between enhancers and promoters is operational. An enhancer region as a whole must be able to stimulate transcription at a distance; this need not be true of a promoter region or its component elements. On the other hand, a promoter must have one or more elements that direct initiation of RNA synthesis at a particular site and in a particular orientation, whereas enhancers lack these specificities. Promoters and enhancers are often overlapping and contiguous, often seeming to have a very similar modular organization.

[0176] Below is a list of promoters/enhancers and inducible promoters/enhancers that could be used in combination with the nucleic acid encoding a gene of interest in an expression construct. Additionally, any promoter/enhancer combination (as per the Eukaryotic Promoter Data Base EPDB) could also be used to drive expression of the gene. Eukaryotic cells can support cytoplasmic transcription from certain bacterial promoters if the appropriate bacterial polymerase is provided, either as part of the delivery complex or as an additional genetic expression construct.

[0177] The promoter and/or enhancer may be, for example, immunoglobulin light chain, immunoglobulin heavy chain, T-cell receptor, HLA DQ a and/or DQ β, β-interferon, interleukin-2, interleukin-2 receptor, MHC class II 5, MHC class II HLA-Dra, β-Actin, muscle creatine kinase (MCK), prealbumin (transthyretin), elastase I, metallothionein (MTII), collagenase, albumin, α-fetoprotein, t-globin, β-globin, c-fos, c-HA-ras, insulin, neural cell adhesion molecule (NCAM), α₁-antitrypain, H2B (TH2B) histone, mouse and/or type I collagen, glucose-regulated proteins (GRP94 and GRP78), rat growth hormone, human serum amyloid A (SAA), troponin I (TN I), platelet-derived growth factor (PDGF), duchenne muscular dystrophy, SV40, polyoma, retroviruses, papilloma virus, hepatitis B virus, human immunodeficiency virus, cytomegalovirus (CMV), and gibbon ape leukemia virus.

[0178] The promoter and/or enhancer may be, for example, immunoglobulin light chain, immunoglobulin heavy chain, T-cell receptor, HLA DQ a and/or DQ β, β-interferon, interleukin-2, interleukin-2 receptor, MHC class II 5, MHC class II HLA-Dra, β-Actin, muscle creatine kinase (MCK), prealbumin (transthyretin), elastase I, metallothionein (MTII), collagenase, albumin, α-fetoprotein, t-globin, β-globin, c-fos, c-HA-ras, insulin, neural cell adhesion molecule (NCAM), α₁-antitrypain, H2B (TH2B) histone, mouse and/or type I collagen, glucose-regulated proteins (GRP94 and GRP78), rat growth hormone, human serum amyloid A (SAA), troponin I (TN I), platelet-derived growth factor (PDGF), duchenne muscular dystrophy, SV40, polyoma, retroviruses, papilloma virus, hepatitis B virus, human immunodeficiency virus, cytomegalovirus (CMV), and gibbon ape leukemia virus.

[0179] In some embodiments, inducible elements may be used. In some embodiments, the inducible element is, for example, MTII, MMTV (mouse mammary tumor virus), β-interferon, adenovirus 5 E2, collagenase, stromelysin, SV40, murine MX gene, GRP78 gene, α-2-macroglobulin, vimentin, MHC class I gene H-2κb, HSP70, proliferin, tumor necrosis factor, and/or thyroid stimulating hormone a gene. In some embodiments, the inducer is phorbol ester (TFA), heavy metals, glucocorticoids, poly(rI)x, poly(rc), E1A, phorbol ester (TPA), interferon, Newcastle Disease Virus, A23187, IL-6, serum, interferon, SV40 large T antigen, PMA, and/or thyroid hormone. Any of the inducible elements described herein may be used with any of the inducers described herein.

[0180] Of particular interest are muscle specific promoters. These include the myosin light chain-2 promoter, the α-actin promoter, the troponin 1 promoter; the Na⁺/Ca²⁺ exchanger promoter, the dystrophin promoter, the α7 integrin promoter, the brain natriuretic peptide promoter and the αB-crystallin/small heat shock protein promoter, α-myosin heavy chain promoter and the ANF promoter. In some embodiments, the muscle specific promoter is the CK8 promoter. The CK8 promoter has the following sequence (SEQ ID NO. 77):

| | |
|---|---|
| 1 | CTAGACTAGC ATGCTGCCCA TGTAAGGAGG CAAGGCCTGG GGACACCCGA |
| | GATGCCTGGT |
| 61 | TATAATTAAC CCAGACATGT GGCTGCCCCC CCCCCCCCAA CACCTGCTGC |
| | CTCTAAAAAT |
| 121 | AACCCTGCAT GCCATGTTCC CGGCGAAGGG CCAGCTGTCC CCCGCCAGCT |
| | AGACTCAGCA |
| 181 | CTTAGTTTAG GAACCAGTGA GCAAGTCAGC CCTTGGGGCA GCCCATACAA |
| | GGCCATGGGG |
| 241 | CTGGGCAAGC TGCACGCCTG GGTCCGGGGT GGGCACGGTG CCCGGGCAAC |
| | GAGCTGAAAG |
| 301 | CTCATCTGCT CTCAGGGGCC CCTCCCTGGG GACAGCCCCT CCTGGCTAGT |
| | CACACCCTGT |
| 361 | AGGCTCCTCT ATATAACCCA GGGGCACAGG GGCTGCCCTC ATTCTACCAC |
| | CACCTCCACA |
| 421 | GCACAGACAG ACACTCAGGA GCCAGCCAGC |

[0181] In some embodiments, the muscle-cell cell specific promoter is a variant of the CK8 promoter, called CK8e. The CK8e promoter has the following sequence (SEQ ID NO. 78):

| | |
|---|---|
| 1 | TGCCCATGTA AGGAGGCAAG GCCTGGGGAC ACCCGAGATG CCTGGTTATA ATTAACCCAG |
| 61 | ACATGTGGCT GCCCCCCCCC CCCCAACACC TGCTGCCTCT AAAAATAACC CTGCATGCCA |
| 121 | TGTTCCCGGC GAAGGGCCAG CTGTCCCCCG CCAGCTAGAC TCAGCACTTA GTTTAGGAAC |
| 181 | CAGTGAGCAA GTCAGCCCTT GGGGCAGCCC ATACAAGGCC ATGGGGCTGG GCAAGCTGCA |
| 241 | CGCCTGGGTC CGGGGTGGGC ACGGTGCCCG GGCAACGAGC TGAAAGCTCA TCTGCTCTCA |
| 301 | GGGGCCCCTC CCTGGGGACA GCCCCTCCTG GCTAGTCACA CCCTGTAGGC TCCTCTATAT |
| 361 | AACCCAGGGG CACAGGGGCT GCCCTCATTC TACCACCACC TCCACAGCAC AGACAGACAC |
| 421 | TCAGGAGCCA GCCAGC |

[0182] Where a cDNA insert is employed, one will typically desire to include a polyadenylation signal to effect proper polyadenylation of the gene transcript. Any polyadenylation sequence may be employed such as human growth hormone and SV40 polyadenylation signals. Also contemplated as an element of the expression cassette is a terminator. These elements can serve to enhance message levels and to minimize read through from the cassette into other sequences.

[0183] B. 2A Protease

[0184] The inventor utilizes the 2A-like self-cleaving domain from the insect virus Thosea asigna (TaV 2A peptide; SEQ ID NO. 79; EGRGSLLTCGDVEENPGP). These 2A-like domains have been shown to function across Eukaryotes and cause cleavage of amino acids to occur co-translationally within the 2A-like peptide domain. Therefore, inclusion of TaV 2A peptide allows the expression of multiple proteins from a single mRNA transcript. Importantly, the domain of TaV when tested in eukaryotic systems has shown greater than 99% cleavage activity. Other acceptable 2A-like peptides include, but are not limited to, equine rhinitis A virus (ERAV) 2A peptide (SEQ ID NO. 80; QCTNYALLKLAGDVESNPGP), porcine teschovirus-1 (PTV1) 2A peptide (SEQ ID NO. 81; ATNFSLLKQAGDVEENPGP) and foot and mouth disease virus (FMDV) 2A peptide (SEQ ID NO. 82; PVKQLLNFDLLKLAGDVESNPGP) or modified versions thereof.

[0185] In some embodiments, the 2A peptide is used to express a reporter and a Cfp1 or a Cas9 simultaneously. The reporter may be, for example, GFP.

[0186] Other self-cleaving peptides that may be used include, but are not limited to nuclear inclusion protein a (Nia) protease, a P1 protease, a 3C protease, a L protease, a 3C-like protease, or modified versions thereof.

[0187] C. Delivery of Expression Vectors

[0188] There are a number of ways in which expression vectors may be introduced into cells. In certain embodiments, the expression construct comprises a virus or engineered construct derived from a viral genome. The ability of certain viruses to enter cells via receptor-mediated endocytosis, to integrate into host cell genome and express viral genes stably and efficiently have made them attractive candidates for the transfer of foreign genes into mammalian cells. These have a relatively low capacity for foreign DNA sequences and have a restricted host spectrum. Furthermore, their oncogenic potential and cytopathic effects in permissive cells raise safety concerns. They can accommodate only up to 8 kB of foreign genetic material but can be readily introduced in a variety of cell lines and laboratory animals.

[0189] One of the preferred methods for in vivo delivery involves the use of an adenovirus expression vector. “Adenovirus expression vector” is meant to include those constructs containing adenovirus sequences sufficient to (a) support packaging of the construct and (b) to express an antisense polynucleotide that has been cloned therein. In this context, expression does not require that the gene product be synthesized.

[0190] The expression vector comprises a genetically engineered form of adenovirus. Knowledge of the genetic organization of adenovirus, a 36 kB, linear, double-stranded DNA virus, allows substitution of large pieces of adenoviral DNA with foreign sequences up to 7 kB. In contrast to retrovirus, the adenoviral infection of host cells does not result in chromosomal integration because adenoviral DNA can replicate in an episomal manner without potential genotoxicity. Also, adenoviruses are structurally stable, and no genome rearrangement has been detected after extensive amplification. Adenovirus can infect virtually all epithelial cells regardless of their cell cycle stage. So far, adenoviral infection appears to be linked only to mild disease such as acute respiratory disease in humans.

[0191] Adenovirus is particularly suitable for use as a gene transfer vector because of its mid-sized genome, ease of manipulation, high titer, wide target cell range and high infectivity. Both ends of the viral genome contain 100-200 base pair inverted repeats (ITRs), which are cis elements necessary for viral DNA replication and packaging. The early (E) and late (L) regions of the genome contain different transcription units that are divided by the onset of viral DNA replication. The E1 region (E1A and E1B) encodes proteins responsible for the regulation of transcription of the viral genome and a few cellular genes. The expression of the E2 region (E2A and E2B) results in the synthesis of the proteins for viral DNA replication. These proteins are involved in DNA replication, late gene expression and host cell shut-off. The products of the late genes, including the majority of the viral capsid proteins, are expressed only after significant processing of a single primary transcript issued by the major late promoter (MLP). The MLP, (located at 16.8 m.u.) is particularly efficient during the late phase of infection, and all the mRNAs issued from this promoter possess a 5′-tripartite leader (TPL) sequence which makes them preferred mRNAs for translation.

[0192] In one system, recombinant adenovirus is generated from homologous recombination between shuttle vector and provirus vector. Due to the possible recombination between two proviral vectors, wild-type adenovirus may be generated from this process. Therefore, it is critical to isolate a single clone of virus from an individual plaque and examine its genomic structure.

[0193] Generation and propagation of the current adenovirus vectors, which are replication deficient, depend on a unique helper cell line, designated 293, which was transformed from human embryonic kidney cells by Ad5 DNA fragments and constitutively expresses E1 proteins. Since the E3 region is dispensable from the adenovirus genome, the current adenovirus vectors, with the help of 293 cells, carry foreign DNA in either the E1, the D3 or both regions. In nature, adenovirus can package approximately 105% of the wild-type genome, providing capacity for about 2 extra kb of DNA. Combined with the approximately 5.5 kb of DNA that is replaceable in the E1 and E3 regions, the maximum capacity of the current adenovirus vector is under 7.5 kb, or about 15% of the total length of the vector. More than 80% of the adenovirus viral genome remains in the vector backbone and is the source of vector-borne cytotoxicity. Also, the replication deficiency of the E1-deleted virus is incomplete.

[0194] Helper cell lines may be derived from human cells such as human embryonic kidney cells, muscle cells, hematopoietic cells or other human embryonic mesenchymal or epithelial cells. Alternatively, the helper cells may be derived from the cells of other mammalian species that are permissive for human adenovirus. Such cells include, e.g., Vero cells or other monkey embryonic mesenchymal or epithelial cells. As stated above, the preferred helper cell line is 293.

[0195] Methods for culturing 293 cells and propagating adenovirus are known to those of skill in the art. In one format, natural cell aggregates are grown by inoculating individual cells into 1 liter siliconized spinner flasks (Techne, Cambridge, UK) containing 100-200 ml of medium. Following stirring at 40 rpm, the cell viability is estimated with trypan blue. In another format, Fibra-Cel microcarriers (Bibby Sterlin, Stone, UK) (5 g/l) is employed as follows. A cell inoculum, resuspended in 5 ml of medium, is added to the carrier (50 ml) in a 250 ml Erlenmeyer flask and left stationary, with occasional agitation, for 1 to 4 h. The medium is then replaced with 50 ml of fresh medium and shaking initiated. For virus production, cells are allowed to grow to about 80% confluence, after which time the medium is replaced (to 25% of the final volume) and adenovirus added at an MOI of 0.05. Cultures are left stationary overnight, following which the volume is increased to 100% and shaking commenced for another 72 h.

[0196] The adenoviruses of the disclosure are replication defective, or at least conditionally replication defective. The adenovirus may be of any of the 42 different known serotypes or subgroups A-F. Adenovirus type 5 of subgroup C is the preferred starting material in order to obtain the conditional replication-defective adenovirus vector for use as described herein.

[0197] As stated above, the typical vector of the disclosure is replication defective and will not have an adenovirus E1 region. Thus, it will be most convenient to introduce the polynucleotide encoding the gene of interest at the position from which the E1-coding sequences have been removed. However, the position of insertion of the construct within the adenovirus sequences is not critical. The polynucleotide encoding the gene of interest may also be inserted in lieu of the deleted E3 region in E3 replacement vectors, or in the E4 region where a helper cell line or helper virus complements the E4 defect.

[0198] Adenovirus is easy to grow and manipulate and exhibits broad host range in vitro and in vivo. This group of viruses can be obtained in high titers, e.g., 10⁹-10¹² plaque-forming units per ml, and they are highly infective. The life cycle of adenovirus does not require integration into the host cell genome. The foreign genes delivered by adenovirus vectors are episomal and, therefore, have low genotoxicity to host cells. No side effects have been reported in studies of vaccination with wild-type adenovirus, demonstrating their safety and therapeutic potential as in vivo gene transfer vectors.

[0199] Adenovirus vectors have been used in eukaryotic gene expression and vaccine development. Animal studies suggested that recombinant adenovirus could be used for gene therapy. Studies in administering recombinant adenovirus to different tissues include trachea instillation, muscle injection, peripheral intravenous injections and stereotactic inoculation into the brain.

[0200] The retroviruses are a group of single-stranded RNA viruses characterized by an ability to convert their RNA to double-stranded DNA in infected cells by a process of reverse-transcription. The resulting DNA then stably integrates into cellular chromosomes as a provirus and directs synthesis of viral proteins. The integration results in the retention of the viral gene sequences in the recipient cell and its descendants. The retroviral genome contains three genes, gag, pol, and env that code for capsid proteins, polymerase enzyme, and envelope components, respectively. A sequence found upstream from the gag gene contains a signal for packaging of the genome into virions. Two long terminal repeat (LTR) sequences are present at the 5′ and 3′ ends of the viral genome. These contain strong promoter and enhancer sequences and are also required for integration in the host cell genome.

[0201] In order to construct a retroviral vector, a nucleic acid encoding a gene of interest is inserted into the viral genome in the place of certain viral sequences to produce a virus that is replication-defective. In order to produce virions, a packaging cell line containing the gag, pol, and env genes but without the LTR and packaging components is constructed. When a recombinant plasmid containing a cDNA, together with the retroviral LTR and packaging sequences is introduced into this cell line (by calcium phosphate precipitation for example), the packaging sequence allows the RNA transcript of the recombinant plasmid to be packaged into viral particles, which are then secreted into the culture media. The media containing the recombinant retroviruses is then collected, optionally concentrated, and used for gene transfer. Retroviral vectors are able to infect a broad variety of cell types. However, integration and stable expression require the division of host cells.

[0202] A novel approach designed to allow specific targeting of retrovirus vectors was recently developed based on the chemical modification of a retrovirus by the chemical addition of lactose residues to the viral envelope. This modification could permit the specific infection of hepatocytes via sialoglycoprotein receptors.

[0203] A different approach to targeting of recombinant retroviruses may be used, in which biotinylated antibodies against a retroviral envelope protein and against a specific cell receptor are used. The antibodies are coupled via the biotin components by using streptavidin. Using antibodies against major histocompatibility complex class I and class II antigens, it has been demonstrated the infection of a variety of human cells that bore those surface antigens with an ecotropic virus in vitro.

[0204] There are certain limitations to the use of retrovirus vectors. For example, retrovirus vectors usually integrate into random sites in the cell genome. This can lead to insertional mutagenesis through the interruption of host genes or through the insertion of viral regulatory sequences that can interfere with the function of flanking genes. Another concern with the use of defective retrovirus vectors is the potential appearance of wild-type replication-competent virus in the packaging cells. This can result from recombination events in which the intact-sequence from the recombinant virus inserts upstream from the gag, pol, env sequence integrated in the host cell genome. However, new packaging cell lines are now available that should greatly decrease the likelihood of recombination.

[0205] Other viral vectors may be employed as expression constructs. Vectors derived from viruses such as vaccinia virus, adeno-associated virus (AAV), and herpesviruses may be employed. They offer several attractive features for various mammalian cells.

[0206] In embodiments, the AAV vector is replication-defective or conditionally replication defective. In embodiments, the AAV vector is a recombinant AAV vector. In some embodiments, the AAV vector comprises a sequence isolated or derived from an AAV vector of serotype AAV1, AAV2, AAV3, AAV4, AAV5, AAV6, AAV7, AAV8, AAV9, AAV10, AAV11, or any combination thereof. In some embodiments, the AAV vector is not an AAV9 vector. In some embodiments, the AAV vector is an AAVRh.74 vector.

[0207] In some embodiments, a single viral vector is used to deliver a nucleic acid encoding Cpf1 or Cas9 and at least one gRNA to a cell. In some embodiments, Cpf1 or Cas9 is provided to a cell using a first viral vector and at least one gRNA is provided to the cell using a second viral vector. In order to effect expression of sense or antisense gene constructs, the expression construct must be delivered into a cell. The cell may be a muscle cell, a satellite cell, a mesangioblast, a bone marrow derived cell, a stromal cell or a mesenchymal stem cell. In embodiments, the cell is a cardiac muscle cell, a skeletal muscle cell, or a smooth muscle cell. In embodiments, the cell is a cell in the tibialis anterior, quadriceps, soleus, diaphragm or heart. In some embodiments, the cell is an induced pluripotent stem cell (iPSC) or inner cell mass cell (iCM). In further embodiments, the cell is a human iPSC or a human iCM. In some embodiments, human iPSCs or human iCMs of the disclosure may be derived from a cultured stem cell line, an adult stem cell, a placental stem cell, or from another source of adult or embryonic stem cells that does not require the destruction of a human embryo. Delivery to a cell may be accomplished in vitro, as in laboratory procedures for transforming cells lines, or in vivo or ex vivo, as in the treatment of certain disease states. One mechanism for delivery is via viral infection where the expression construct is encapsidated in an infectious viral particle.

[0208] Several non-viral methods for the transfer of expression constructs into cultured mammalian cells also are contemplated by the present disclosure. These include calcium phosphate precipitation, DEAE-dextran, electroporation, direct microinjection, DNA-loaded liposomes, and lipofectamine-DNA complexes, cell sonication, gene bombardment using high velocity microprojectiles, and receptor-mediated transfection. Some of these techniques may be successfully adapted for in vivo or ex vivo use.

[0209] Once the expression construct has been delivered into the cell the nucleic acid encoding the gene of interest may be positioned and expressed at different sites. In certain embodiments, the nucleic acid encoding the gene may be stably integrated into the genome of the cell. This integration may be in the cognate location and orientation via homologous recombination (gene replacement) or it may be integrated in a random, non-specific location (gene augmentation). In yet further embodiments, the nucleic acid may be stably maintained in the cell as a separate, episomal segment of DNA. Such nucleic acid segments or “episomes” encode sequences sufficient to permit maintenance and replication independent of or in synchronization with the host cell cycle. How the expression construct is delivered to a cell and where in the cell the nucleic acid remains is dependent on the type of expression construct employed.

[0210] In yet another embodiment, the expression construct may simply consist of naked recombinant DNA or plasmids. Transfer of the construct may be performed by any of the methods mentioned above which physically or chemically permeabilize the cell membrane. This is particularly applicable for transfer in vitro but it may be applied to in vivo use as well. One group successfully injected polyomavirus DNA in the form of calcium phosphate precipitates into liver and spleen of adult and newborn mice demonstrating active viral replication and acute infection. Another group also demonstrated that direct intraperitoneal injection of calcium phosphate-precipitated plasmids results in expression of the transfected genes. DNA encoding a gene of interest may also be transferred in a similar manner in vivo and express the gene product.

[0211] In still another embodiment for transferring a naked DNA expression construct into cells may involve particle bombardment. This method depends on the ability to accelerate DNA-coated microprojectiles to a high velocity allowing them to pierce cell membranes and enter cells without killing them. Several devices for accelerating small particles have been developed. One such device relies on a high voltage discharge to generate an electrical current, which in turn provides the motive force. The microprojectiles used have consisted of biologically inert substances such as tungsten or gold beads.

[0212] In some embodiments, the expression construct is delivered directly to the liver, skin, and/or muscle tissue of a subject. This may require surgical exposure of the tissue or cells, to eliminate any intervening tissue between the gun and the target organ, i.e., ex vivo treatment. Again, DNA encoding a particular gene may be delivered via this method and still be incorporated by the present disclosure.

[0213] In a further embodiment, the expression construct may be entrapped in a liposome. Liposomes are vesicular structures characterized by a phospholipid bilayer membrane and an inner aqueous medium. Multilamellar liposomes have multiple lipid layers separated by aqueous medium. They form spontaneously when phospholipids are suspended in an excess of aqueous solution. The lipid components undergo self-rearrangement before the formation of closed structures and entrap water and dissolved solutes between the lipid bilayers. Also contemplated are lipofectamine-DNA complexes.

[0214] Liposome-mediated nucleic acid delivery and expression of foreign DNA in vitro has been very successful. A reagent known as Lipofectamine 2000™ is widely used and commercially available.

[0215] In certain embodiments, the liposome may be complexed with a hemagglutinating virus (HVJ), to facilitate fusion with the cell membrane and promote cell entry of liposome-encapsulated DNA. In other embodiments, the liposome may be complexed or employed in conjunction with nuclear non-histone chromosomal proteins (HMG-1). In yet further embodiments, the liposome may be complexed or employed in conjunction with both HVJ and HMG-1. In that such expression constructs have been successfully employed in transfer and expression of nucleic acid in vitro and in vivo, then they are applicable for the present disclosure. Where a bacterial promoter is employed in the DNA construct, it also will be desirable to include within the liposome an appropriate bacterial polymerase.

[0216] Other expression constructs which can be employed to deliver a nucleic acid encoding a particular gene into cells are receptor-mediated delivery vehicles. These take advantage of the selective uptake of macromolecules by receptor-mediated endocytosis in almost all eukaryotic cells. Because of the cell type-specific distribution of various receptors, the delivery can be highly specific.

[0217] Receptor-mediated gene targeting vehicles generally consist of two components: a cell receptor-specific ligand and a DNA-binding agent. Several ligands have been used for receptor-mediated gene transfer. The most extensively characterized ligands are asialoorosomucoid (ASOR) and transferrin. A synthetic neoglycoprotein, which recognizes the same receptor as ASOR, has been used as a gene delivery vehicle and epidermal growth factor (EGF) has also been used to deliver genes to squamous carcinoma cells.

### IV. PHARMACEUTICAL COMPOSITIONS AND DELIVERY METHODS

[0218] For clinical applications, pharmaceutical compositions are prepared in a form appropriate for the intended application. Generally, this entails preparing compositions that are essentially free of pyrogens, as well as other impurities that could be harmful to humans or animals.

[0219] Appropriate salts and buffers are used to render drugs, proteins or delivery vectors stable and allow for uptake by target cells. Aqueous compositions of the present disclosure comprise an effective amount of the drug, vector or proteins, dissolved or dispersed in a pharmaceutically acceptable carrier or aqueous medium. The phrase “pharmaceutically or pharmacologically acceptable” refer to molecular entities and compositions that do not produce adverse, allergic, or other untoward reactions when administered to an animal or a human. As used herein, “pharmaceutically acceptable carrier” includes solvents, buffers, solutions, dispersion media, coatings, antibacterial and antifungal agents, isotonic and absorption delaying agents and the like acceptable for use in formulating pharmaceuticals, such as pharmaceuticals suitable for administration to humans. The use of such media and agents for pharmaceutically active substances is well known in the art. Any conventional media or agent that is not incompatible with the active ingredients described herein, its use in therapeutic compositions may be used. Supplementary active ingredients also can be incorporated into the compositions, provided they do not inactivate the vectors or cells of the compositions.

[0220] In some embodiments, the active compositions of the present disclosure may include classic pharmaceutical preparations. Administration of these compositions according to the present disclosure may be via any common route so long as the target tissue is available via that route, but generally including systemic administration. This includes oral, nasal, or buccal.

[0221] Alternatively, administration may be by intradermal, subcutaneous, intramuscular, intraperitoneal or intravenous injection, or by direct injection into muscle tissue. Such compositions are normally administered as pharmaceutically acceptable compositions, as described supra.

[0222] The active compounds may also be administered parenterally or intraperitoneally. By way of illustration, solutions of the active compounds as free base or pharmacologically acceptable salts can be prepared in water suitably mixed with a surfactant, such as hydroxypropylcellulose. Dispersions can also be prepared in glycerol, liquid polyethylene glycols, and mixtures thereof and in oils. Under ordinary conditions of storage and use, these preparations generally contain a preservative to prevent the growth of microorganisms.

[0223] The pharmaceutical forms suitable for injectable use include, for example, sterile aqueous solutions or dispersions and sterile powders for the extemporaneous preparation of sterile injectable solutions or dispersions. Generally, these preparations are sterile and fluid to the extent that easy injectability exists. Preparations should be stable under the conditions of manufacture and storage and should be preserved against the contaminating action of microorganisms, such as bacteria and fungi. Appropriate solvents or dispersion media may contain, for example, water, ethanol, polyol (for example, glycerol, propylene glycol, and liquid polyethylene glycol, and the like), suitable mixtures thereof, and vegetable oils. The proper fluidity can be maintained, for example, by the use of a coating, such as lecithin, by the maintenance of the required particle size in the case of dispersion and by the use of surfactants. The prevention of the action of microorganisms can be brought about by various antibacterial and antifungal agents, for example, parabens, chlorobutanol, phenol, sorbic acid, thimerosal, and the like. In many cases, it will be preferable to include isotonic agents, for example, sugars or sodium chloride. Prolonged absorption of the injectable compositions can be brought about by the use in the compositions of agents delaying absorption, for example, aluminum monostearate and gelatin.

[0224] Sterile injectable solutions may be prepared by incorporating the active compounds in an appropriate amount into a solvent along with any other ingredients (for example as enumerated above) as desired, followed by filtered sterilization. Generally, dispersions are prepared by incorporating the various sterilized active ingredients into a sterile vehicle which contains the basic dispersion medium and the desired other ingredients, e.g., as enumerated above. In the case of sterile powders for the preparation of sterile injectable solutions, the preferred methods of preparation include vacuum-drying and freeze-drying techniques which yield a powder of the active ingredient(s) plus any additional desired ingredient from a previously sterile-filtered solution thereof.

[0225] In some embodiments, the compositions of the present disclosure are formulated in a neutral or salt form. Pharmaceutically-acceptable salts include, for example, acid addition salts (formed with the free amino groups of the protein) derived from inorganic acids (e.g., hydrochloric or phosphoric acids, or from organic acids (e.g., acetic, oxalic, tartaric, mandelic, and the like). Salts formed with the free carboxyl groups of the protein can also be derived from inorganic bases (e.g., sodium, potassium, ammonium, calcium, or ferric hydroxides) or from organic bases (e.g., isopropylamine, trimethylamine, histidine, procaine and the like.)

[0226] Upon formulation, solutions are preferably administered in a manner compatible with the dosage formulation and in such amount as is therapeutically effective. The formulations may easily be administered in a variety of dosage forms such as injectable solutions, drug release capsules and the like. For parenteral administration in an aqueous solution, for example, the solution generally is suitably buffered and the liquid diluent first rendered isotonic for example with sufficient saline or glucose. Such aqueous solutions may be used, for example, for intravenous, intramuscular, subcutaneous and intraperitoneal administration. Preferably, sterile aqueous media are employed as is known to those of skill in the art, particularly in light of the present disclosure. By way of illustration, a single dose may be dissolved in 1 ml of isotonic NaCl solution and either added to 1000 ml of hypodermoclysis fluid or injected at the proposed site of infusion. Some variation in dosage will necessarily occur depending on the condition of the subject being treated. The person responsible for administration will, in any event, determine the appropriate dose for the individual subject. Moreover, for human administration, preparations should meet sterility, pyrogenicity, general safety and purity standards as required by FDA Office of Biologics standards.

[0227] In some embodiments, the Cpf1 or Cas9 and gRNAs described herein may be delivered to the patient using adoptive cell transfer (ACT). In adoptive cell transfer, one or more expression constructs are provided ex vivo to cells which have originated from the patient (autologous) or from one or more individual(s) other than the patient (allogeneic). The cells are subsequently introduced or reintroduced into the patient. Thus, in some embodiments, one or more nucleic acids encoding Cpf1 or Cas9 and a guide RNA that targets a dystrophin splice site are provided to a cell ex vivo before the cell is introduced or reintroduced to a patient.

### V. DMD MYOEDITING

[0228] A dystrophin mutation that disrupts the actin-binding domain may be generated. The inventors generated a human iPSC line with a deletion of exons 8 and 9 in the DMD gene using CRISPR/Cas9-mediated editing to analyze the effect ABD-1 deletions on muscle function (FIG. 1A). Two single guide RNAs (gRNAs), targeting sequences in intron 7 and intron 9 of the DMD gene in the presence of Streptococcus pyogenes Cas9, were used to delete DMD exons 8-9 in healthy human iPSCs (FIG. 1B). This induced DMD mutant human cell line is referred to as ΔEx8-9 iDMD, and represents the common 5′-proximal hot spot mutations. Human iPSCs harboring DMD exons 8-9 deletions were picked by clonal selection and the mutation was confirmed by sequencing genomic DNA (FIG. 1C). The human ΔEx8-9 iDMD iPSC line has a 1,909 bp deletion, which generates a newly formed junction between intron 7 to intron 9 (FIG. 1C). Primers within intron 7 flanking the gRNA-7 targeting site were used to validate the deletion and as expected showed no PCR product with ΔEx8-9 iDMD compared to control iPSC with a 424 bp product (FIG. 1C). The ΔEx8-9 iDMD iPSCs were differentiated to cardiomyocytes and RT-PCR was performed using forward and reverse primers targeting exons 1 and 10, respectively (FIG. 1D). Sequencing of the RT-PCR products showed splicing of exon 7 to exon 10, which created a premature stop codon following the first 5 amino acids encoded by exon 10 (FIG. 1D). Loss of dystrophin protein was confirmed by Western blot analysis and immunocytochemistry in ΔEx8-9 iDMD iPSC-derived cardiomyocytes (FIGS. 1E-F).

[0229] The ΔEx8-9 iDMD mutation may be corrected by exon deletion strategies. For example, three different CRISPR/Cas9-mediated strategies were used to correct the mutation in ΔEx8-9 iDMD iPSCs in order to restore the dystrophin open reading frame (FIG. 2A). These strategies generated dystrophin with different truncations in the ABD-1 domain, providing a means of analyzing the effect of ABD-1 deletions on muscle function. For each strategy, the inventors applied two gRNAs to delete multiple exons and analyzed two independent iPSC clones. Strategy #1 generated ΔEx3-9 iPSCs, by targeting intron 2 and intron 7 with gRNAs, and deleting exons 3 through 7 (FIG. 2B). Genomic sequencing of the genome edited region showed a hybrid junction of intron 2 to intron 7, confirming generation of ΔEx3-9 iPSCs (FIG. 2C). Following differentiation of ΔEx3-9 iPSCs to cardiomyocytes, RT-PCR was performed using primers within exon 1 and exon 10 (FIG. 2D). Sequencing of the RT-PCR product showed splicing of exon 2 to exon 10. Restoration of the DMD open reading frame generated a truncated dystrophin protein lacking the ABS-2 and ABS-3 regions. Dystrophin expression was confirmed by Western blot analysis and immunocytochemistry of ΔEx3-9 iPSC-derived cardiomyocytes (FIGS. 2E-F; FIG. 7A).

[0230] Strategy #2 generated ΔEx6-9 iPSCs, using gRNAs targeting intron 5 and intron 7 in order to delete exons 6 and 7 (FIG. 3A). This form of CRISPR/Cas9 editing resulted in deletion of exon 6 through exon 9, which was confirmed by sequencing of genomic PCR products (FIG. 3B). Following differentiation, RT-PCR using primers within exon 1 and exon 10 was performed on ΔEx6-9 iPSC-derived cardiomyocytes and sequencing of the RT-PCR product confirmed splicing of exon 5 to exon 10 (FIG. 3C). Restoration of dystrophin expression generated a truncated protein lacking the ABS-3 region. Dystrophin expression was confirmed by Western blot analysis and immunocytochemistry in ΔEx6-9 iPSC-derived cardiomyocytes (FIGS. 3D-E; FIGS. 7A-B).

[0231] Strategy #3 generated ΔEx7-11 iPSCs, using gRNAs targeting introns 6 and 11 to delete exons 7 to 11 of ΔEx8-9 iDMD iPSCs (FIG. 4A). This genome editing strategy introduced the largest deletion of 164 kb in ΔEx8-9 iDMD iPSCs. Similar to the first two correction strategies, single cell-derived colonies were picked from the corrected iPSC pool and the genomic region was sequenced to confirm editing (FIG. 4B). The ΔEx7-11 iPSCs were differentiated to cardiomyocytes, and RT PCR was performed with primers within exon 5 and exon 12 to reveal splicing of exon 6 to exon 12, as seen by sequencing (FIG. 4C). Restoration of the DMD open reading frame of ΔEx7-11 iPSC-derived cardiomyocytes generated a truncated dystrophin protein lacking amino acids 177-444 but with all three ABS intact. Dystrophin expression was confirmed by Western blot analysis and immunocytochemistry (FIGS. 4D-E; FIGS. 7A-B). The inventors observed less dystrophin expression in ΔEx7-11 iPSC-derived cardiomyocytes compared to control iPSC-derived cardiomyocytes and the other corrected lines, ΔEx3-9 and ΔEx6-9. Previously, it was shown that missense mutations associated with the DMD phenotype caused steady-state decreases in dystrophin protein levels inversely proportional to the tertiary stability and directly caused by proteasomal degradation. Consistent with this report, the inventors observed increased dystrophin protein levels when ΔEx7-11 iPSC-derived cardiomyocytes were treated with the proteasome inhibitor MG-132, as measured by Western blot analysis (FIG. 4F; FIG. 7C). This suggests that deletion of DMD exons 7-11, which produces dystrophin lacking 177-444 amino acids, results in a truncated form of dystrophin that is degraded.

[0232] Functional restoration of iPSC-derived cardiomyocytes may be achieved by correction of ABD-1 mutations. To assess the consequences of ABD-1 mutations and the effect of correction by genome editing on dystrophin function in muscle, the inventors analyzed spontaneous Ca²⁺ activity in iPSC-derived cardiomyocytes (FIG. 5A). For each CRISPR/Cas9-edited correction, the inventors analyzed data sets from two corrected clones. As expected, the inventors observed that calcium release and reuptake parameters, including time to peak, Ca²⁺ decay rate, and transient duration were significantly higher in the ΔEx8-9 iDMD iPSC-derived cardiomyocytes compared to isogenic control cells (FIGS. 5B-D). Additionally, greater than 50% of the ΔEx8-9 iDMD iPSC-derived cardiomyocytes demonstrated abnormal Ca²⁺ activity, which represents an arrhythmogenic-like phenotype (FIG. 5E). In contrast, only 10.7% of the control iPSC-derived cardiomyocytes were desynchronized (FIG. 5E).

[0233] Corrected ΔEx3-9 iPSC-derived cardiomyocytes displayed normalized Ca²⁺ transient kinetics and decreased asynchronous activity similar to isogenic control cells, suggesting restoration of dystrophin function (FIGS. 5A-G). Cardiomyocytes derived from ΔEx6-9 iPSCs showed improved Ca²⁺ handling, although not to the level seen with ΔEx3-9 cells (FIGS. 5A-G). The Ca²⁺ decay rate and Ca²⁺ transient duration were shorter in ΔEx6-9 iPSC-derived cardiomyocytes (FIGS. 5B and 5D) and the number of arrhythmic cells was decreased to 29% compared to ΔEx8-9 iDMD cells (FIG. 5E). However, the parameters observed in the ΔEx6-9 iPSC-derived cardiomyocytes did not reach the levels of control iPSC-derived cardiomyocytes. The ΔEx7-11 iPSC-derived cardiomyocytes, similarly to ΔEx6-9 cells, showed improvement in Ca²⁺ release and uptake when compared to ΔEx8-9 iDMD cardiomyocytes (FIGS. 5B and 5C), however they did not reach control cell levels. iPSC-derived cardiomyocytes with ΔEx7-11 had the highest number of arrhythmic cells, up to 35.9%, among the corrected cell lines (FIG. 5E). Taken together, these findings indicate that deletion of exons 3-9 (ΔEx3-9) to correct DMD mutations within the 5′-proximal hot spot of the DMD gene produces a truncated dystrophin protein with restoration of function.

[0234] Further assessment of the functional properties of the iPSC-derived cardiomyocyte cell lines was performed by generating engineered heart muscle (EHM), which displays phenotypic properties of the postnatal myocardium. EHM was generated as shown in FIG. 8A using ˜95% pure iPSC-derived cardiomyocytes, as measured by α-actinin expression (FIG. 8B). Consistent with the calcium handling data, the inventors observed enhanced contractile performance in all corrected cell lines, with the most pronounced effects in ΔEx3-9 EHM (FIG. 5F). Moreover, the inventors observed an increased tendency for arrhythmic contractions in ΔEx8-9 iDMD-EHM and a reduction in ΔEx3-9 EHM (FIG. 8C).

[0235] Correction of DMD patient-derived iPSCs may be achieved by deleting exons 3-9. An iPSC line, referred to as pΔEx3-7, was generated from a DMD patient (SC604A-MD) with a deletion of exons 3-7 in the DMD gene. pΔEx3-7 iPSCs are used as patient-in-a-dish model of DMD with a mutation in the ABD-1. To evaluate the effectiveness of exon 3-9 deletion in restoration of cardiomyocyte function, the inventors corrected pΔEx3-7 by deleting exons 8 and 9 to generate pΔEx3-9. Two gRNAs targeting introns 7 and 9 were used to excise exons 8-9, generating pΔEx3-9 iPSCs (FIG. 6A). Sequencing of genomic DNA PCR products confirmed the hybrid junction of intron 7 to intron 9 in a single cell-derived iPSC colony (FIG. 6B). Both pΔEx3-7 and pΔEx3-9 iPSC lines were differentiated into cardiomyocytes and RT-PCR was performed with primers targeting the 5′-UTR and exon 10. In pΔEx3-7 iPSC-derived cardiomyocytes, the junction of exon 2 to exon 8 was seen by sequencing of the RT-PCR product (FIG. 6C). In corrected pΔEx3-9 iPSC-derived cardiomyocytes, the junction of exon 2 to exon 10 was demonstrated by sequencing the RT-PCR product (FIG. 6C). Western blot analysis showed a low level of dystrophin expression in DMD pΔEx3-7 iPSC-derived cardiomyocytes (FIG. 6D). This is consistent with previous reports showing low levels of dystrophin protein expression in patients lacking exons 3-7 due to re-initiation of translation at an in-frame start codon in exon 8 (Fletcher et al., 2012; Winnard et al., 1995). Corrected pΔEx3-9 iPSC-derived cardiomyocytes showed dystrophin expression similar to normal control cardiomyocytes (FIG. 6D). These findings were confirmed by immunocytochemistry (FIG. 6E).

[0236] Spontaneous Ca²⁺ activity was assessed in these patient-derived cells as a measure of iPSC-derived cardiomyocyte functionality (FIGS. 6F-I). In pΔEx3-7 DMD iPSC-derived cardiomyocytes, Ca²⁺ time to peak and time to half decay were elevated (FIGS. 6F-G). This caused an overall slower Ca²⁺ transient (FIG. 6H) and elevated the number of arrhythmic cells, up to 53% (FIG. 6I). Corrected pΔEx3-9 iPSC-derived cardiomyocytes had significantly improved time to peak and faster Ca²⁺ decay (FIGS. 6F-G). Although these parameters of the corrected pΔEx3-9 iPSC-derived cardiomyocytes did not reach normal control levels, the number of arrhythmic cells was 18.5%, similar to control iPSC-derived cardiomyocytes (FIG. 6I). These findings show improved iPSC-derived cardiomyocyte function after genomic editing to excise exons 3-9 of the DMD gene in DMD patient-derived iPSCs.

[0237] ΔEx8-9 DMD mouse models may be used to recapitulate the muscle dystrophy phenotype. To investigate CRISPR/Cas9-mediated exon skipping and reframing in vivo, a mimic of the human ABD-1 region mutations was generated in a mouse model by deleting exons 8 and 9, using CRISPR/Cas9 system directed by two single guide RNAs (sgRNA) (FIG. 9A and Table 2). The inventors designed and validated sgRNAs targeting introns, flanking 5′ end and 3′ ends of Dmd exons 8 and 9 respectively. C57BL/6 zygotes were co-injected with in vitro transcribed Cas9 mRNA and in vitro transcribed sgRNAs, and then re-implanted into pseudo-pregnant females.

[0238] The deletion of Dmd exons 8-9 was confirmed by DNA genotyping. Mice lacking exons 8-9 showed pronounced dystrophic muscle changes in 1 and 2 month-old mice (FIG. 9B). The deletion of these exons placed the dystrophin gene out of frame leading to the absence of dystrophin protein in skeletal muscle and heart (FIG. 9C). The grip strength of the ΔEx8-9 DMD was significantly weaker than that in wild-type mice (FIG. 9D). Serum analysis of the ΔEx8-9 DMD mice shows a significant increase of creatine kinase (CK) level, which is a sign of muscle damage (FIG. 9E). Taken together, dystrophin protein expression, muscle histology, muscle strength and serum creatine kinase level validated the dystrophic phenotype of the ΔEx8-9 DMD mouse model.

[0239] Dystrophin protein serves as a muscular shock absorber by providing a structural link between the cytoskeleton and the extracellular matrix to maintain muscle integrity. Essential regions of the dystrophin protein are located at both ends of the protein; the amino-terminus contains ABD-1, the actin binding domain, and the carboxy-terminus includes binding sites for components of the dystrophin associated protein complex, such as sarcoglycans and dystroglycans. Genomic mutations in the DMD gene encoding non-essential regions have been excised by exon skipping and deletion to restore functional, albeit truncated, dystrophin protein. Here, the inventors use CRISPR/Cas9-mediated editing to selectively delete exons 3-9 of the DMD gene encoding part of the essential ABD-1 region. With precision genomic editing, they can modify the essential amino-terminal region and restore dystrophin expression and cardiomyocyte function.

[0240] To provide an isogenic control iPSC line for these studies, the inventors generated an iDMD model (ΔEx8-9) by deleting DMD exons 8 and 9 in a healthy donor-derived iPSC line. They confirmed ΔEx8-9 iDMD iPSCs as a model of DMD by showing that cardiomyocytes derived from these cells do not express dystrophin protein and display arrhythmias attributable to impaired Ca²⁺ cycling. The lack of dystrophin results in the loss of linkage between the extracellular matrix and the actin cytoskeleton, destabilizing membrane proteins and resulting in generation of reactive oxygen species and excessive Ca²⁺ entry. Consistent with these findings, it was shown that cardiomyocytes differentiated from DMD iPSCs have slower Ca²⁺ cycling. Additionally, others have reported cellular abnormalities such as elevated levels of resting Ca²⁺, mitochondrial damage and apoptosis in DMD-derived iPSC cardiomyocytes. Complementary to the phenotype of DMD iPSC-derived cardiomyocytes, DMD patients develop cardiomyopathy, fibrosis and cardiac arrhythmias. Taken together, this corroborates the inventors' findings that deletion of exons 8 and 9 of the DMD gene in normal iPSCs generates an iDMD model, and that cardiomyocytes derived from ΔEx8-9 iDMD serve as a model of “DMD in a dish”.

[0241] The approach reported here is to use CRISPR/Cas9-mediated genomic editing to restore the open reading of the DMD gene and measure the functional outcome of truncated dystrophin in muscle. One of the issues of using CRISPR/Cas9 editing is the occurrence of unintended, off-target, genomic cleavage. Reassuringly, previous reports showed that CRISPR/Cas9-modified human iPSC clones do not exhibit elevated off-target mutation rates, supporting the use of edited iPSC clones for disease modeling. Nevertheless, the inventors recognize that Cas9 nuclease poses a potential safety concern for clinical applicability and acknowledge that whole-genome sequencing should be performed in future in vivo studies to identify potential off-target changes in the genome.

[0242] Mutations in the ABD-1 region are genotypically and phenotypically variable in patients. In some cases, out-of-frame ABD-1 mutations display a BMD phenotype, most likely due to the presence of an alternative translation initiation site in exons 6 or exon 8. Interestingly, it was shown that deletion of exon 2 activates an alternative translation initiation site in exon 6 to generate truncated dystrophin. However, duplication of exon 2, which results in a stop codon within the duplicated exon 2, does not activate an alternative translation initiation site. To correct the duplication of exon 2, a U7 small nuclear RNA was used against exon 2 to skip one or both copies of exon 2, generating either full length or truncated dystrophin. Another approach used to correct exon 2 duplication was to use CRISPR/Cas9-mediated editing with one gRNA directed against a duplicated intronic region, resulting in precise deletion of one of the duplicated exons and restoration the DMD gene. Patients with deletion of exons 3-7 display variable phenotypes, depending on whether the alternative translation initiation site in exon 8 is used. However, in general, patients with ABD-1 mutations display a severe BMD phenotype or are diagnosed as DMD. Studies using micro- and mini-dystrophins as therapeutic approaches to treat DMD showed that the truncated dystrophins remain functional if they lack portions of the central rod domain. However, restoration of muscle function by expression of micro-dystrophin in the mdx mouse model of DMD must include an intact ABD-1 region.

[0243] Correcting the ABD-1 mutation in DMD is not exclusively based on restoring the open reading frame. Functional assessment of the truncated dystrophin isoforms that are modified in the ABD-1 region is essential. There are three actin-binding sites (ABSs) localized within the ABD-1 region: ABS1 (amino acids 18-27 encoded by exon 2); ABS2 (amino acids 88-116 encoded by exon 5); and ABS3 (amino acids 131-147 encoded by exon 6). The three approaches to correct ΔEx8-9 iDMD iPSCs by CRISPR/Cas9-mediated editing produced different modifications to the dystrophin ABD-1 region, such that corrected ΔEx3-9 retained the ABS1; corrected ΔEx6-9 retained both ABS1 and ABS2; and corrected ΔEx7-11 retained all three actin binding sites. Unexpectedly, the ΔEx7-11 correction, which retained most of the ABD-1 region, created the least stable protein, showing minimal restoration of function. The ΔEx7-11 iPSC-derived cardiomyocytes expressed low levels of dystrophin protein compared to isogenic control cells and the corrected ΔEx3-9 and ΔEx6-9 lines. The decrease in dystrophin expression in the ΔEx7-11 iPSC-derived cardiomyocytes resulted in slower Ca²⁺ cycling and higher propensity for arrhythmias. In eDystrophin (edystrophin.genouest.org), a database dedicated to human dystrophin variants produced by in-frame DMD gene mutations, a patient with the ΔEx7-11 DMD deletion was annotated as DMD. It has also been reported that a single missense point mutation in exon 11 causes DMD protein mis-folding and dysfunction, resulting in a BMD phenotype. Therefore, the inventors conclude that although the deletion of exons 7-11 maintains the open reading frame of the DMD gene, the absence of amino acids 178-444 causes protein mis-folding and subsequent degradation. Indeed, by inhibiting proteasome activity, truncated dystrophin protein increased in ΔEx7-11 iPSC-derived cardiomyocytes. Furthermore, it was reported that when recreated in vitro, point mutations in the ABD-1 region that cause a human DMD phenotype are associated with decreased dystrophin protein levels due to proteasomal degradation.

[0244] Correction of DMD ΔEx8-9 mutation by deleting exons 6-9 retained ABS1 and ABS2 and improved Ca²⁺ activity in cardiomyocytes, but did not fully restore function to control levels. Shorter time to peak in these cells indicates faster Ca²⁺ release from the intracellular stores. However, slower Ca²⁺ decay in these cells compared to control cells suggests that their Ca²⁺ re-uptake system was not completely restored, resulting in arrhythmias. A similar strategy was applied to correct the ABD-1 mutation in a golden retriever dog model of DMD, which harbors a mutation in the exon 7 splice site. Some functional improvement was seen when exons 6-8 were deleted, resulting in splicing of exon 5 to 9 or to exon 10 due to occurrence of a cryptic splice site in exon 9.

[0245] Among the three genome-editing correction strategies the inventors tested, ΔEx3-9 which generated the truncated dystrophin lacking amino acid residues 32-320, was the most effective in restoring functionality of iPSC-derived cardiomyocytes. The inventors used CRISPR/Cas9 to create ΔEx3-9 using ΔEx8-9 iDMD or DMD patient-derived pΔEx3-7 iPSCs, and they restored iPSC-derived cardiomyocyte function in both ΔEx3-9 corrected cell lines. ΔEx3-9 produces truncated dystrophin that retains ABS1. Consistent with the inventors' findings, it was shown that overexpressing the dystrophin isoform lacking ABS2 and ABS3, prevents severe dystrophy in mdx mice. In addition, by surveying different databases, one group identified 15 patients with an exon 3-9 deletion, 11 of whom were asymptomatic or diagnosed as BMD. In fact, one of these patients is a competitive badminton player and was asymptomatic until he was diagnosed with BMD at age 67. His dystrophin level was recorded using two different dystrophin antibodies, as 47% of the control level using a C-terminus antibody and 62% of the control level using a rod domain antibody. Another of these patients expressed only 15% of normal dystrophin levels and showed a slight decrease in cardiac function at age 21 with no obvious skeletal muscle involvement. Similarly, in mouse models, at least 20% of full-length or central rod domain-deleted dystrophin expression is required to rescue the mdx phenotype. In human mutations involving the 5′-proximal region of the DMD gene, 30% or more of dystrophin expression is required to prevent diagnosis of muscular dystrophy in X-linked dilated cardiomyopathy patients. Taken together, these reports show in both mice and humans that deletion of exons 3-9 of the DMD gene produces a stable, albeit truncated dystrophin protein capable of maintaining function even when expressed at low levels.

[0246] The functional relevance of the ΔEx3-9 mutation and its potential therapeutic superiority compared to ΔEx6-9 and ΔEx7-11 was further underscored by phenotypic screening in EHM. All three models resulted in improved contractile performance compared to the iDMD model, however, ΔEx3-9-EHM showed the most enhanced contractile force and lowest propensity for arrhythmic contractions. This suggests deletion of exons 3-9 of the DMD gene as a practical candidate for exon-deletion which could be applicable to ˜7% of DMD patients' mutations. The other two correction strategies that deleted exons 6-9 or 7-11, each could potentially correct ˜2% of DMD patients' mutations based on the UMD-DMD database. Although shown as a possible gene therapy approach for correcting DMD, the inventors are aware that deletion of exons 3-9 of the DMD gene generates a large genome deletion up to ˜150 kb. To this point, large genome deletions by CRISPR/Cas9-mediated editing of up to 725 kb of the DMD gene have been previously reported to delete exons 45-55 in human cells in vitro, and in a humanized DMD mouse model in vivo.

[0247] To test efficiency of CRISPR/Cas9-mediated deletion of exons 3-9 of the DMD gene by two gRNAs and the function of the truncated dystrophin in vivo, the inventors generated the ΔEx8-9 DMD mouse model, which presents dystrophic phenotype. This model could be used to test multiple exon skipping as well as exons reframing approaches to correct dystrophin ABD-1 mutations.

[0248] In summary, the inventors' human iPSC results provide evidence that deletion of exons 3-9 in the DMD gene restores muscle function and is applicable for using CRIPSR/Cas9 genomic editing to correct ABD-1 mutations that were previously not addressed. The functional properties of these dystrophin ABD-1 mutations will dictate the most efficacious CRISPR/Cas9 strategy for possible genomic editing to correct DMD mutations within the proximal hot spot of the DMD gene allowing effective restoration of dystrophin function.

### VI. EXAMPLES

[0249] The following examples are included to demonstrate preferred embodiments of the disclosure. It should be appreciated by those of skill in the art that the techniques disclosed in the examples which follow represent techniques discovered by the inventor to function well in the practice of the disclosure, and thus can be considered to constitute preferred modes for its practice. However, those of skill in the art should, in light of the present disclosure, appreciate that many changes can be made in the specific embodiments which are disclosed and still obtain a like or similar result without departing from the spirit and scope of the disclosure.

### Example 1—Materials and Methods

[0250] Study Approval.

[0251] All experimental procedures involving animals in this study were reviewed and approved by the University of Texas Southwestern Medical Center's Institutional Animal Care and Use Committee.

[0252] Human iPSC Maintenance, Nucleofection and Differentiation.

[0253] Human healthy donor induced pluripotent stem cells were reprogrammed from peripheral blood mononuclear cells with CytoTune-iPS Sendai Reprogramming Kit (catalog # A16518; Thermo Fisher Scientific). Human Muscular Dystrophy iPS Cell Line (catalog #SC604A-MD; Systems Biosciences Inc.) were referred to as pΔEx3-7. Human iPSCs were cultured in mTeSR™1 media (catalog #05850; STEMCELL Technologies) and passaged approximately every 3-4 days (1:12-1:18 split ratio). One hour before nucleofection, iPSCs were treated with 10 μM ROCK inhibitor, Y-27632 (catalog #S1049, Selleckchem) and dissociated into single cells using Accutase (catalog #A6964 Innovative Cell Technologies, Inc.). 1×10⁶ iPS cells were mixed with 6 μg total of pSpCas9(BB)-2A-GFP (PX458) from Feng Zhang (MIT, Cambridge, Mass.) Addgene plasmid #48138 (Ran et al., 2013) plasmid and nucleofected using the P3 Primary Cell 4D-Nucleofector X kit (catalog #V4XP-3024; Lonza) according to manufacturer's protocol. After nucleofection, iPSCs were cultured in mTeSR™1 media supplemented with 10 μM ROCK inhibitor and 100 μg/ml Primocin (InvivoGen), and the next day the media was switched to fresh mTeSR™1. Three days post-nucleofection, GFP(+) and GFP(−) cells were sorted by FACS and subjected to genotyping by PCR. Single clones derived from GFP(+) iPSCs were picked, genotyped and sequenced. iPSCs were induced to differentiate into cardiomyocytes, using previously described protocol with modifications. When cells reached ˜80% confluency the medium was changed to CDM3 every other day until day 10. On day 0-2, medium was supplemented with 4 μM of CHIR99021 (catalog #S2924; Selleckchem). On day 2-4 medium was supplemented with 2 μM WNT-C59 (catalog #S7037; Selleckchem). On day 10 after differentiation initiation, media was changed to RPMI 1640 medium, no glucose (catalog #11879020; Thermo Fisher Scientific) supplemented with B27-supplement (catalog #17504044; Thermo Fisher Scientific) for 10 days. On day 20 media was switched to cells maintaining media, RPMI 1640 medium, (catalog #11875093; Thermo Fisher Scientific) supplemented with B27-supplement. Cardiomyocytes were used for experiments on day 30-40 after initiation of differentiation.

[0254] Genomic DNA Isolation.

[0255] Genomic DNA of human iPSCs was isolated using DirectPCR (Cell) (catalog #302-C; Viagen) according to manufacturer's recommendations.

[0256] RT-PCR.

[0257] RNA from iPSC-derived cardiomyocytes was isolated using TRIzol (catalog #15596026; ThermoFisher Scientific), and extracted with Direct-zol™ RNA MiniPrep kit according to manufacturer's protocol. cDNA was synthesized using iScript™ gDNA Clear cDNA Synthesis Kit (catalog #1725034; Bio-Rad Laboratories) according to manufacturer's instructions. 2 g of cDNA per reaction was used for RT-PCR reaction using Taq polymerase for 40 cycles. Primer pairs used for human DMD RT-PCR were as follows:

(SEQ ID NO: 83)
Exon 1 forward: 5′-CTTTGGTGGGAAGAAGTAGAGGACTG-3′
(SEQ ID NO: 84)
5′-UTR forward: 5′-CTTTCCCCCTACAGGACTCAG-3′
(SEQ ID NO: 85)
Exon 5 forward: 5′-TTGGAAGTACTGACATCGTAGATGGA-3′
(SEQ ID NO: 86)
Exon 10 reverse: 5′-CTCAGCAGAAAGAAGCCACGATAATA-3′
(SEQ ID NO: 87)
Exon 12 reverse: 5′-TGTTAGCCAGTCATTCAACTCTTTCA-3′

PCR products for exon 1 forward exon 10 reverse were 1073 bps in ctrl iPSC-CM 762 bps in ΔEx8-9 iDMD iPSC-CM and 206 bps in ΔEx3-9 iPSC-CM. PCR products for exon 5 forward exon 10 reverse were 797 bps in ctrl iPSC-CM 486 bps in ΔEx8-9 iDMD iPSC-CM and 194 bps in ΔEx6-9 iPSC-CM. PCR products for exon 5 forward exon 12 reverse were 1115 bps in ctrl iPSC-CM 804 bps in ΔEx8-9 iDMD iPSC-CM and 314 bps in ΔEx7-11 iPSC-CM. PCR products for 5′-UTR forward exon 10 reverse were 1345 bps in ctrl iPSC-CM 748 bps in pΔEx3-7 iPSC-CM and 544 bps in pΔEx3-9 iPSC-CM. PCR products were run on 1.5% agarose gel, excised and sequenced. Primer pair used for human α-actinin control is:

(SEQ ID NO: 88)
ACTN2 forward: 5′-CAACTTCAACACGCTGCAGACCAA-3′
(SEQ ID NO: 89)
ACTN2 reverse: 5′-AAGCGCTCCAGTCTTCGAATCTCA-3′

[0258] Dystrophin Western Blot Analysis.

[0259] iPSC-CMs were collected in cold PBS on ice, centrifuged and lysed with RIPA lysis buffer: 150 mM NaCl, 0.5% sodium deoxycholate, 0.1% SDS, 5% glycerol, 50 mM Tris-HCl pH 7.4, 1% Nonidet P40. Samples were needle-homogenized, big clumps were removed by centrifugation and supernatant was incubated at 95° C. 10 min in the presence of Laemmli sample buffer. 10 μg of protein per sample was separated on Mini-PROTEAN TGX 4-20% pre-cast gel (BioRad) for 3 hr at 100V. Proteins were transferred to PVDF membrane at 100V for 1.5 hr. Membranes were probed with mouse anti-dystrophin antibody MANDYS8 (1:1000) (catalog #D8168; Sigma) and with mouse anti-vinculin antibody, hVIN-1 (1:1000) (catalog #V9131; Sigma). For analysis of DEx7-11 iPSC-derived cardiomyocytes treated with proteasome inhibitor MG132, membranes were cut and the upper portion was probed with mouse MANDYS8 anti-dystrophin antibody (1:1000) (catalog # D8168; Sigma) and the lower portion with mouse anti-GAPDH antibody, (1:1000) (catalog # MAB374; 6C5, EMD Milipore). Goat anti-mouse HRP-conjugated secondary antibodies were used (1:10,000) (catalog #172-1011; Bio-Rad).

[0260] Dystrophin and Troponin-I Immunocytochemistry.

[0261] iPSC-derived cardiomyocytes (1×10⁵) seeded on 12 mm coverslips coated with poly-D-lysine and Matrigel (catalog #354248; Corning,) were removed from culture media and fixed in cold acetone (10 minutes, −20° C.). Following fixation, coverslips were equilibrated in phosphate-buffered saline, pH 7.3 (PBS) and then blocked for one-hour with serum cocktail (2% normal horse serum/2% normal donkey serum/0.2% bovine serum albumin (BSA/PBS)). Excess blocking cocktail was removed and dystrophin/troponin primary antibody cocktail, mouse anti-dystrophin (1:800) (catalog #D8168; MANDYS8, Sigma-Aldrich) and rabbit anti-troponin-I (1:200) (catalog #sc-15368; H170, Santa Cruz Biotechnology) in 0.2% BSA/PBS was applied without an intervening wash. Following overnight incubation at 4° C., unbound primary antibodies were removed with PBS washes, and coverslips were probed for one-hour with secondary antibodies, biotinylated horse anti-Mouse IgG (1:200) (Vector Laboratories) and fluorescein-conjugated donkey anti-rabbit IgG (1:50) (Jackson Immunoresearch) diluted in 0.2% BSA/PBS. Unbound secondary antibodies were removed with PBS washes and final dystrophin labeling done with 10-minute incubation of rhodamine-avidin-DCS (1:60) (Vector Laboratories) diluted in PBS. Unbound rhodamine was removed with PBS washes, nuclei were counterstained with 2 μg/ml Hoechst 33342 (Molecular Probes, Eugene, Oreg.), and coverslips were inverted onto slides overlaying Vectashield fluorescent mounting media (Vector Laboratories).

[0262] Calcium Imaging.

[0263] iPSC-derived cardiomyocytes were dissociated with TryplE (catalog #12605036; Thermo Fisher Scientific) and single cells were plated at low density on Matrigel coated 35 mm glass-bottom dishes and Ca²⁺ handling was measured 3-4 days after plating. To monitor changes in cytoplasmic Ca²⁺, iPSC-derived cardiomyocytes were loaded with 5 μM fluorescent Ca²⁺ indicator Fluo-4 AM (catalog # F14201; Thermo Fisher Scientific) in the presence of 2 mmol/L of Pluronic F-127 for 20 min in Tyrode's solution (140 mM NaCl, 5.4 mM KCl, 1 mM MgCl₂, 10 mM glucose, 1.8 mM CaCl₂, 10 mM HEPES, pH 7.4). The Ca²⁺ transients of spontaneously beating iPSC-derived cardiomyocytes were imaged at 37° C. using a Zeiss LSM880 confocal system using 40× oil immersion objective. Ca²⁺ transients were processed and analyzed using ImageJ (NIH, Bethesda) and pClamp 10.2 software (Axon Instrument). For the calcium release phase, the inventors calculated time to peak (time from baseline to maximal point of the transient). For evaluation of calcium re-uptake, the total transient time and time of Ca²⁺ decay were evaluated. The time of Ca²⁺ decay was calculated by fitting a first-order exponential decay to the calcium reuptake phase of the calcium transient profile. Cells were considered arrhythmic if they had one or more asynchronized Ca²⁺ transient. For each experimental group, the inventors analyzed cells from at least three independent sets of iPSC-derived cardiomyocytes.

[0264] Engineered Heart Muscle.

[0265] Engineered heart muscle (EHM) was constructed as previously reported from iPSC-derived cardiomyocytes of iDMD (ΔEx8-9; n=6) and the corrected lines (ΔEx3-9, n=14; ΔEx6-9, n=3; ΔEx7-11, n=3). All lines were adapted to a published cardiomyocyte differentiation protocol, which resulted in high and homogeneous cardiomyocyte purity in the different iPSC cultures, showing 95±1% α-actinin positive (ACTN2⁺) cardiomyocytes by flow cytometry; n=8. For EHM construction, 1×10⁶ iPSC-derived cardiomyocytes were mixed with 0.5×10⁶ human foreskin fibroblasts (catalog #SCRC-1041; ATCC). EHM was cultured for 4 weeks followed by isometric force measurements under electrical field stimulation (1.5 Hz) at 37° C. in Tyrode's solution. Two healthy donor-derived iPSC lines were included as a reference: control (WT) shiPS9-1 (Daniel Garry, University of Minnesota, Minneapolis, Minn.) (n=4) and hiPSC-G1 line (n=4).

[0266] CRISPR/Cas9-Mediated Exon Deletion in Mice.

[0267] Two single-guide RNA (sgRNA) specific regions of introns 7 and 9, surrounding exons 8 and 9 in the sequence of the mouse Dmd locus, were cloned into vector pX458. For the in vitro transcription of sgRNA, T7 promoter sequence was added to the sgRNA template by PCR. The gel purified PCR products were used as template for in vitro transcription using the MEGAshortscript T7 Kit (Life Technologies). sgRNA were purified by MEGAclear kit (Life Technologies) and eluted with nuclease-free water (Ambion). The concentration of guide RNA was measured by a NanoDrop instrument (Thermo Scientific).

[0268] Genotyping of ΔEx8-9 DMD Mice.

[0269] ΔEx8-9 DMD mice were genotyped using primers encompassing the targeted region as follows:

(SEQ ID NO: 90)
mDMD_i7_forward: 5′-GAGGTTTAAAACATTAAGCCTTTCC-3′
(SEQ ID NO: 91)
mDMD_i7_reverse: 5′-ACATTAAGATGGACTTCTTGTCTGG-3′
(SEQ ID NO: 92)
mDMD_i9_reverse: 5′-TACTCACATATGGGTCGTTTTCCTT-3′.

Tail biopsies were digested in 100 μL of 25 mM NaOH, 0.2 mM EDTA (pH 12) for 20 min at 95° C. Tails were briefly centrifuged followed by addition of 100 μL of 40 mM Tris.HCl (pH 5) and mixed to homogenize. Two microliters of this reaction was used for subsequent PCR reactions with the primers below, followed by gel electrophoresis.

[0270] Histological Analysis of Muscles.

[0271] Skeletal muscles from WT and ΔEx8-9 DMD mice were individually dissected and cryoembedded in a 1:2 volume mixture of Gum Tragacanth powder (Sigma-Aldrich) to Tissue Freezing Medium (TFM) (Triangle Bioscience). All embeds were snap frozen in isopentane heat extractant supercooled to −155° C. Resulting blocks were stored overnight at −80° C. prior to sectioning. Eight-micron transverse sections of skeletal muscle, and frontal sections of heart were prepared on a Leica CM3050 cryostat and air-dried prior to same day staining. H&E staining was performed according to established staining protocols and dystrophin immunohistochemistry was performed using MANDYS8 monoclonal antibody (Sigma-Aldrich) with modifications to manufacturer's instructions. In brief, cryostat sections were thawed and rehydrated/delipidated in 1% triton/phosphate-buffered-saline, pH 7.4 (PBS). Following delipidation, sections were washed free of Triton, incubated with mouse IgG blocking reagent (M.O.M. Kit, Vector Laboratories), washed, and sequentially equilibrated with MOM protein concentrate/PBS, and MANDYS8 diluted 1:1800 in MOM protein concentrate/PBS. Following overnight primary antibody incubation at 4° C., sections were washed, incubated with MOM biotinylated anti-mouse IgG, washed, and detection completed with incubation of Vector fluorescein-avidin DCS. Nuclei were counterstained with propidium iodide (Molecular Probes) prior to cover slipping with Vectashield.

[0272] Statistical Analysis.

[0273] Statistical analysis was assessed by one-way ANOVA or two-way ANOVA and Tukey's post-hoc test (F) were indicated. Data are shown as mean±SEM. A P<0.05 value was considered statistically significant.

### Example 2—Results

[0274] Generating a Dystrophin Mutation that Disrupts the Actin-Binding Domain.

[0275] The inventors generated a human iPSC line with a deletion of exons 8 and 9 in the DMD gene using CRISPR/Cas9-mediated editing to analyze the effect ABD-1 deletions on muscle function (FIG. 1A). Two single guide RNAs (gRNAs), targeting sequences in intron 7 and intron 9 of the DMD gene in the presence of Streptococcus pyogenes Cas9, were used to delete DMD exons 8-9 in healthy human iPSCs (FIG. 1B). This induced DMD mutant human cell line is referred to as ΔEx8-9 iDMD, and represents the common 5′-proximal hot spot mutations. Human iPSCs harboring DMD exons 8-9 deletions were picked by clonal selection and the mutation was confirmed by sequencing genomic DNA (FIG. 1C). The human ΔEx8-9 iDMD iPSC line has a 1,909 bp deletion, which generates a newly formed junction between intron 7 to intron 9 (FIG. 1C). Primers within intron 7 flanking the gRNA-7 targeting site were used to validate the deletion and as expected showed no PCR product with ΔEx8-9 iDMD compared to control iPSC with a 424 bp product (FIG. 1C). The ΔEx8-9 iDMD iPSCs were differentiated to cardiomyocytes and RT-PCR was performed using forward and reverse primers targeting exons 1 and 10, respectively (FIG. 1D). Sequencing of the RT-PCR products showed splicing of exon 7 to exon 10, which created a premature stop codon following the first 5 amino acids encoded by exon 10 (FIG. 1D). Loss of dystrophin protein was confirmed by Western blot analysis and immunocytochemistry in ΔEx8-9 iDMD iPSC-derived cardiomyocytes (FIGS. 1E-F).

[0276] Correction of the ΔEx8-9 iDMD Mutation by Exon Deletion Strategies.

[0277] Three different CRISPR/Cas9-mediated strategies were used to correct the mutation in ΔEx8-9 iDMD iPSCs in order to restore the dystrophin open reading frame (FIG. 2A). These strategies generated dystrophin with different truncations in the ABD-1 domain, providing a means of analyzing the effect of ABD-1 deletions on muscle function. For each strategy, the inventors applied two gRNAs to delete multiple exons and analyzed two independent iPSC clones. Strategy #1 generated ΔEx3-9 iPSCs, by targeting intron 2 and intron 7 with gRNAs, and deleting exons 3 through 7 (FIG. 2B). Genomic sequencing of the genome edited region showed a hybrid junction of intron 2 to intron 7, confirming generation of ΔEx3-9 iPSCs (FIG. 2C). Following differentiation of ΔEx3-9 iPSCs to cardiomyocytes, RT-PCR was performed using primers within exon 1 and exon 10 (FIG. 2D). Sequencing of the RT-PCR product showed splicing of exon 2 to exon 10. Restoration of the DMD open reading frame generated a truncated dystrophin protein lacking the ABS-2 and ABS-3 regions. Dystrophin expression was confirmed by Western blot analysis and immunocytochemistry of ΔEx3-9 iPSC-derived cardiomyocytes (FIGS. 2E-F; FIG. 7A).

[0278] Strategy #2 generated ΔEx6-9 iPSCs, using gRNAs targeting intron 5 and intron 7 in order to delete exons 6 and 7 (FIG. 3A). This form of CRISPR/Cas9 editing resulted in deletion of exon 6 through exon 9, which was confirmed by sequencing of genomic PCR products (FIG. 3B). Following differentiation, RT-PCR using primers within exon 1 and exon 10 was performed on ΔEx6-9 iPSC-derived cardiomyocytes and sequencing of the RT-PCR product confirmed splicing of exon 5 to exon 10 (FIG. 3C). Restoration of dystrophin expression generated a truncated protein lacking the ABS-3 region. Dystrophin expression was confirmed by Western blot analysis and immunocytochemistry in ΔEx6-9 iPSC-derived cardiomyocytes (FIGS. 3D-E; FIGS. 7A-B).

[0279] Strategy #3 generated ΔEx7-11 iPSCs, using gRNAs targeting introns 6 and 11 to delete exons 7 to 11 of ΔEx8-9 iDMD iPSCs (FIG. 4A). This genome editing strategy introduced the largest deletion of 164 kb in ΔEx8-9 iDMD iPSCs. Similar to the first two correction strategies, single cell-derived colonies were picked from the corrected iPSC pool and the genomic region was sequenced to confirm editing (FIG. 4B). The ΔEx7-11 iPSCs were differentiated to cardiomyocytes, and RT PCR was performed with primers within exon 5 and exon 12 to reveal splicing of exon 6 to exon 12, as seen by sequencing (FIG. 4C). Restoration of the DMD open reading frame of ΔEx7-11 iPSC-derived cardiomyocytes generated a truncated dystrophin protein lacking amino acids 177-444 but with all three ABS intact. Dystrophin expression was confirmed by Western blot analysis and immunocytochemistry (FIGS. 4D-E; FIGS. 7A-B). The inventors observed less dystrophin expression in ΔEx7-11 iPSC-derived cardiomyocytes compared to control iPSC-derived cardiomyocytes and the other corrected lines, ΔEx3-9 and ΔEx6-9. Previously, it was shown that missense mutations associated with the DMD phenotype caused steady-state decreases in dystrophin protein levels inversely proportional to the tertiary stability and directly caused by proteasomal degradation. Consistent with this report, the inventors observed increased dystrophin protein levels when ΔEx7-11 iPSC-derived cardiomyocytes were treated with the proteasome inhibitor MG-132, as measured by Western blot analysis (FIG. 4F; FIG. 7C). This suggests that deletion of DMD exons 7-11, which produces dystrophin lacking 177-444 amino acids, results in a truncated form of dystrophin that is degraded.

[0280] Functional Restoration of iPSC-Derived Cardiomyocytes by Correction of ABD-1 Mutations.

[0281] To assess the consequences of ABD-1 mutations and the effect of correction by genome editing on dystrophin function in muscle, the inventors analyzed spontaneous Ca²⁺ activity in iPSC-derived cardiomyocytes (FIG. 5A). For each CRISPR/Cas9-edited correction, the inventors analyzed data sets from two corrected clones. As expected, the inventors observed that calcium release and reuptake parameters, including time to peak, Ca²⁺ decay rate, and transient duration were significantly higher in the ΔEx8-9 iDMD iPSC-derived cardiomyocytes compared to isogenic control cells (FIGS. 5B-D). Additionally, greater than 50% of the ΔEx8-9 iDMD iPSC-derived cardiomyocytes demonstrated abnormal Ca²⁺ activity, which represents an arrhythmogenic-like phenotype (FIG. 5E). In contrast, only 10.7% of the control iPSC-derived cardiomyocytes were desynchronized (FIG. 5E).

[0282] Corrected ΔEx3-9 iPSC-derived cardiomyocytes displayed normalized Ca²⁺ transient kinetics and decreased asynchronous activity similar to isogenic control cells, suggesting restoration of dystrophin function (FIGS. 5A-G). Cardiomyocytes derived from ΔEx6-9 iPSCs showed improved Ca²⁺ handling, although not to the level seen with ΔEx3-9 cells (FIGS. 5A-G). The Ca²⁺ decay rate and Ca²⁺ transient duration were shorter in ΔEx6-9 iPSC-derived cardiomyocytes (FIGS. 5B and 5D) and the number of arrhythmic cells was decreased to 29% compared to ΔEx8-9 iDMD cells (FIG. 5E). However, the parameters observed in the ΔEx6-9 iPSC-derived cardiomyocytes did not reach the levels of control iPSC-derived cardiomyocytes. The ΔEx7-11 iPSC-derived cardiomyocytes, similarly to ΔEx6-9 cells, showed improvement in Ca²⁺ release and uptake when compared to ΔEx8-9 iDMD cardiomyocytes (FIGS. 5B and 5C), however they did not reach control cell levels. iPSC-derived cardiomyocytes with ΔEx7-11 had the highest number of arrhythmic cells, up to 35.9%, among the corrected cell lines (FIG. 5E). Taken together, these findings indicate that deletion of exons 3-9 (ΔEx3-9) to correct DMD mutations within the 5′-proximal hot spot of the DMD gene produces a truncated dystrophin protein with restoration of function.

[0283] Further assessment of the functional properties of the iPSC-derived cardiomyocyte cell lines was performed by generating engineered heart muscle (EHM), which displays phenotypic properties of the postnatal myocardium. EHM was generated as shown in FIG. 8A using ˜95% pure iPSC-derived cardiomyocytes, as measured by α-actinin expression (FIG. 8B). Consistent with the calcium handling data, the inventors observed enhanced contractile performance in all corrected cell lines, with the most pronounced effects in ΔEx3-9 EHM (FIG. 5F). Moreover, the inventors observed an increased tendency for arrhythmic contractions in ΔEx8-9 iDMD-EHM and a reduction in ΔEx3-9 EHM (FIG. 8C).

[0284] Correction of DMD Patient-Derived iPSCs by Deleting Exons 3-9.

[0285] An iPSC line, referred to as pΔEx3-7, was generated from a DMD patient (SC604A-MD) with a deletion of exons 3-7 in the DMD gene. pΔEx3-7 iPSCs are used as patient-in-a-dish model of DMD with a mutation in the ABD-1. To evaluate the effectiveness of exon 3-9 deletion in restoration of cardiomyocyte function, the inventors corrected pΔEx3-7 by deleting exons 8 and 9 to generate pΔEx3-9. Two gRNAs targeting introns 7 and 9 were used to excise exons 8-9, generating pΔEx3-9 iPSCs (FIG. 6A). Sequencing of genomic DNA PCR products confirmed the hybrid junction of intron 7 to intron 9 in a single cell-derived iPSC colony (FIG. 6B). Both pΔEx3-7 and pΔEx3-9 iPSC lines were differentiated into cardiomyocytes and RT-PCR was performed with primers targeting the 5′-UTR and exon 10. In pΔEx3-7 iPSC-derived cardiomyocytes, the junction of exon 2 to exon 8 was seen by sequencing of the RT-PCR product (FIG. 6C). In corrected pΔEx3-9 iPSC-derived cardiomyocytes, the junction of exon 2 to exon 10 was demonstrated by sequencing the RT-PCR product (FIG. 6C). Western blot analysis showed a low level of dystrophin expression in DMD pΔEx3-7 iPSC-derived cardiomyocytes (FIG. 6D). This is consistent with previous reports showing low levels of dystrophin protein expression in patients lacking exons 3-7 due to re-initiation of translation at an in-frame start codon in exon 8 (Fletcher et al., 2012; Winnard et al., 1995). Corrected pΔEx3-9 iPSC-derived cardiomyocytes showed dystrophin expression similar to normal control cardiomyocytes (FIG. 6D). These findings were confirmed by immunocytochemistry (FIG. 6E).

[0286] Spontaneous Ca²⁺ activity was assessed in these patient-derived cells as a measure of iPSC-derived cardiomyocyte functionality (FIGS. 6F-I). In pΔEx3-7 DMD iPSC-derived cardiomyocytes, Ca²⁺ time to peak and time to half decay were elevated (FIGS. 6F-G). This caused an overall slower Ca²⁺ transient (FIG. 6H) and elevated the number of arrhythmic cells, up to 53% (FIG. 6I). Corrected pΔEx3-9 iPSC-derived cardiomyocytes had significantly improved time to peak and faster Ca²⁺ decay (FIGS. 6F-G). Although these parameters of the corrected pΔEx3-9 iPSC-derived cardiomyocytes did not reach normal control levels, the number of arrhythmic cells was 18.5%, similar to control iPSC-derived cardiomyocytes (FIG. 6I). These findings show improved iPSC-derived cardiomyocyte function after genomic editing to excise exons 3-9 of the DMD gene in DMD patient-derived iPSCs.

[0287] ΔEx8-9 DMD Mouse Models Recapitulate Muscle Dystrophy Phenotype.

[0288] To investigate CRISPR/Cas9-mediated exon skipping and reframing in vivo, a mimic of the human ABD-1 region mutations was generated in a mouse model by deleting exons 8 and 9, using CRISPR/Cas9 system directed by two single guide RNAs (sgRNA) (FIG. 9A and Table 2). The inventors designed and validated sgRNAs targeting introns, flanking 5′ end and 3′ ends of Dmd exons 8 and 9 respectively. C57BL/6 zygotes were co-injected with in vitro transcribed Cas9 mRNA and in vitro transcribed sgRNAs, and then re-implanted into pseudo-pregnant females.

[0289] The deletion of Dmd exons 8-9 was confirmed by DNA genotyping. Mice lacking exons 8-9 showed pronounced dystrophic muscle changes in 1 and 2 month-old mice (FIG. 9B). The deletion of these exons placed the dystrophin gene out of frame leading to the absence of dystrophin protein in skeletal muscle and heart (FIG. 9C). The grip strength of the ΔEx8-9 DMD was significantly weaker than that in wild-type mice (FIG. 9D). Serum analysis of the ΔEx8-9 DMD mice shows a significant increase of creatine kinase (CK) level, which is a sign of muscle damage (FIG. 9E). Taken together, dystrophin protein expression, muscle histology, muscle strength and serum creatine kinase level validated the dystrophic phenotype of the ΔEx8-9 DMD mouse model.

[0290] All of the compositions and/or methods disclosed and claimed herein can be made and executed without undue experimentation in light of the present disclosure. While the compositions and methods of this disclosure have been described in terms of preferred embodiments, it will be apparent to those of skill in the art that variations may be applied to the compositions and/or methods and in the steps or in the sequence of steps of the method described herein without departing from the concept, spirit and scope of the disclosure. More specifically, it will be apparent that certain agents which are both chemically and physiologically related may be substituted for the agents described herein while the same or similar results would be achieved. All such similar substitutes and modifications apparent to those skilled in the art are deemed to be within the spirit, scope and concept of the disclosure as defined by the appended claims.

### VII. REFERENCES

[0291] The following references, to the extent that they provide exemplary procedural or other details supplementary to those set forth herein, are specifically incorporated herein by reference.
[0292] Angel et al., Mol. Cell. Biol., 7:2256, 1987a.
[0293] Angel et al., Cell, 49:729, 1987b.
[0294] Aartsma-Rus et al., Hum. Mutat. 30, 293-299, 2009.
[0295] Baichwal and Sugden, In: Gene Transfer, Kucherlapati (Ed), NY, Plenum Press, 117-148, 1986.
[0296] Banerji et al., Cell, 27(2 Pt 1):299-308, 1981.
[0297] Banerji et al., Cell, 33(3):729-740, 1983.
[0298] Barnes et al., J Biol. Chem., 272(17):11510-7, 1997.
[0299] Baskin et al., EMBO Mol Med 6, 1610-1621, 2014.
[0300] Benvenisty and Neshif, Proc. Natl. Acad. Sci. USA, 83:9551-9555, 1986.
[0301] Berkhout et al., Cell, 59:273-282, 1989.
[0302] Bhavsar et al., Genomics, 35(1): 11-23, 1996.
[0303] Bikard et al., Nucleic Acids Res. 41(15): 7429-7437, 2013.
[0304] Blanar et al., EMBO J., 8:1139, 1989.
[0305] Bodine and Ley, EMBO J., 6:2997, 1987.
[0306] Boshart et al., Cell, 41:521, 1985.
[0307] Bostick et al., Mol Ther 19, 1826-1832, 2011.
[0308] Bosze et al., EMBO J., 5(7):1615-1623, 1986.
[0309] Braddock et al., Cell, 58:269, 1989.
[0310] Brinster et al., Proc. Natl. Acad. Sci. USA, 82(13):4438-4442, 1985.
[0311] Bulla and Siddiqui, J. Virol., 62:1437, 1986.
[0312] Burridge et al., Nat. Methods 11, 855-860, 2014.
[0313] Bushby et al., Lancet Neurol., 9(1): 77-93 (2010).
[0314] Bushby et al., Lancet Neurol., 9(2): 177-198 (2010).
[0315] Campbell & Kahl, Nature 338, 259-262, 1989.
[0316] Campbell and Villarreal, Mol. Cell. Biol., 8:1993, 1988.
[0317] Campere and Tilghman, Genes and Dev., 3:537, 1989.
[0318] Campo et al., Nature, 303:77, 1983.
[0319] Celander and Haseltine, J. Virology, 61:269, 1987.
[0320] Celander et al., J. Virology, 62:1314, 1988.
[0321] Chandler et al., Cell, 33:489, 1983.
[0322] Chang et al., Mol. Cell. Biol., 9:2153, 1989.
[0323] Chang et al., Stem Cells., 27:1042-1049, 2009.
[0324] Chatterjee et al., Proc. Natl. Acad. Sci. USA, 86:9114, 1989.
[0325] Chen and Okayama, Mol. Cell Biol., 7:2745-2752, 1987.
[0326] Cho et al., Nat. Biotechnol. 31(3): 230-232, 2013.
[0327] Choi et al., Cell, 53:519, 1988.
[0328] Cirak et al., The Lancet 378, 595-605, 2011.
[0329] Coffin, In: Virology, Fields et al. (Eds.), Raven Press, NY, 1437-1500, 1990.
[0330] Cohen et al., J Cell. Physiol., 5:75, 1987.
[0331] Costa et al., Mol. Cell. Biol., 8:81, 1988.
[0332] Couch et al., Am. Rev. Resp. Dis., 88:394-403, 1963.
[0333] Coupar et al., Gene, 68:1-10, 1988.
[0334] Cripe et al., EMBO J., 6:3745, 1987.
[0335] Culotta and Hamer, Mol. Cell. Biol., 9:1376, 1989.
[0336] Dandolo et al., J. Virology, 47:55-64, 1983.
[0337] De Villiers et al., Nature, 312(5991):242-246, 1984.
[0338] Deschamps et al., Science, 230:1174-1177, 1985.
[0339] DeWitt et al., Sci Transl Med 8, 360ra134-360ra134, 2016.
[0340] Donnelly et al., J. Gen. Virol. 82, 1027-1041, 2001.
[0341] Dubensky et al., Proc. Natl. Acad. Sci. USA, 81:7529-7533, 1984.
[0342] Edbrooke et al., Mol. Cell. Biol., 9:1908, 1989.
[0343] Edlund et al., Science, 230:912-916, 1985.
[0344] EP 0273085
[0345] Fechheimer et al., Proc Natl. Acad. Sci. USA, 84:8463-8467, 1987.
[0346] Feng and Holland, Nature, 334:6178, 1988.
[0347] Ferkol et al., FASEB J., 7:1081-1091, 1993.
[0348] Firak et al., Mol. Cell. Biol., 6:3667, 1986.
[0349] Foecking et al., Gene, 45(1):101-105, 1986.
[0350] Fonfara et al., Nature 532, 517-521, 2016.
[0351] Fraley et al., Proc Natl. Acad. Sci. USA, 76:3348-3352, 1979
[0352] Franz et al., Cardoscience, 5(4):235-43, 1994.
[0353] Friedmann, Science, 244:1275-1281, 1989.
[0354] Fujita et al., Cell, 49:357, 1987.
[0355] Ghosh and Bachhawat, In: Liver Diseases, Targeted Diagnosis and Therapy Using Specific Receptors and Ligands, Wu et al. (Eds.), Marcel Dekker, NY, 87-104, 1991.
[0356] Ghosh-Choudhury et al., EMBO J., 6:1733-1739, 1987.
[0357] Gilles et al., Cell, 33:717, 1983.
[0358] Gloss et al., EMBO J., 6:3735, 1987.
[0359] Godbout et al., Mol. Cell. Biol., 8:1169, 1988.
[0360] Gomez-Foix et al., J. Biol. Chem., 267:25129-25134, 1992.
[0361] Goncalves et al., Mol Ther, 19(7): 1331-1341 (2011).
[0362] Goodbourn and Maniatis, Proc. Natl. Acad. Sci. USA, 85:1447, 1988.
[0363] Goodboum et al., Cell, 45:601, 1986.
[0364] Gopal, Mol. Cell Biol., 5:1188-1190, 1985.
[0365] Gopal-Srivastava et al., J Mol. Cell. Biol., 15(12):7081-90, 1995.
[0366] Graham and Prevec, In: Methods in Molecular Biology: Gene Transfer and Expression Protocol, Murray (Ed.), Humana Press, Clifton, N.J., 7:109-128, 1991.
[0367] Graham and van der Eb, Virology, 52:456-467, 1973.
[0368] Graham et al., J Gen. Virol., 36:59-72, 1977.
[0369] Greene et al., Immunology Today, 10:272, 1989
[0370] Grosschedl and Baltimore, Cell, 41:885, 1985.
[0371] Grunhaus and Horwitz, Seminar in Virology, 3:237-252, 1992.
[0372] Harland and Weintraub, J. Cell Biol., 101:1094-1099, 1985.
[0373] Haslinger and Karin, Proc. Natl. Acad. Sci. USA, 82:8572, 1985.
[0374] Hauber and Cullen, J. Virology, 62:673, 1988.
[0375] Hen et al., Nature, 321:249, 1986.
[0376] Hensel et al., Lymphokine Res., 8:347, 1989.
[0377] Hermonat and Muzycska, Proc. Nat'l Acad. Sci. USA, 81:6466-6470, 1984.
[0378] Herr and Clarke, Cell, 45:461, 1986.
[0379] Hersdorffer et al., DNA Cell Biol., 9:713-723, 1990.
[0380] Herz and Gerard, Proc. Nat'l. Acad. Sci. USA 90:2812-2816, 1993.
[0381] Hirochika et al., J. Virol., 61:2599, 1987.
[0382] Holbrook et al., Virology, 157:211, 1987.
[0383] Hollinger & Chamberlain, Current Opinion in Neurology 28, 522-527, 2015.
[0384] Horlick and Benfield, Mol. Cell. Biol., 9:2396, 1989.
[0385] Horwich et al., J. Virol., 64:642-650, 1990.
[0386] Hsu et al., Natl Biotechnol. 31:827-832, 2013
[0387] Huang et al., Cell, 27:245, 1981.
[0388] Hug et al., Mol. Cell. Biol., 8:3065, 1988.
[0389] Hwang et al., Mol. Cell. Biol., 10:585, 1990.
[0390] Imagawa et al., Cell, 51:251, 1987.
[0391] Imbra and Karin, Nature, 323:555, 1986.
[0392] Imler et al., Mol. Cell. Biol., 7:2558, 1987.
[0393] Imperiale and Nevins, Mol. Cell. Biol., 4:875, 1984.
[0394] Jakobovits et al., Mol. Cell. Biol., 8:2555, 1988.
[0395] Jameel and Siddiqui, Mol. Cell. Biol., 6:710, 1986.
[0396] Jaynes et al., Mol. Cell. Biol., 8:62, 1988.
[0397] Jinek et al., Science 337, 816-821, 2012.
[0398] Johnson et al., Mol. Cell. Biol., 9:3393, 1989.
[0399] Jones and Shenk, Cell, 13:181-188, 1978.
[0400] Kadesch and Berg, Mol. Cell. Biol., 6:2593, 1986.
[0401] Kaneda et al., Science, 243:375-378, 1989.
[0402] Karin et al., Mol. Cell. Biol., 7:606, 1987.
[0403] Karlsson et al., EMBO J., 5:2377-2385, 1986.
[0404] Katinka et al., Cell, 20:393, 1980.
[0405] Kato et al., J Biol Chem., 266(6):3361-3364, 1991.
[0406] Kawamoto et al., Mol. Cell. Biol., 8:267, 1988.
[0407] Kelly et al., J. Cell Biol., 129(2):383-96, 1995.
[0408] Kiledjian et al., Mol. Cell. Biol., 8:145, 1988.
[0409] Kim et al., Nature Biotechnology, 1-2, 2016.
[0410] Kim et al., Nature Biotechnology 34, 876-881, 2016.
[0411] Kimura et al., Dev. Growth Differ., 39(3):257-65, 1997.
[0412] Klamut et al., Mol. Cell. Biol., 10:193, 1990.
[0413] Klein et al., Nature, 327:70-73, 1987.
[0414] Koch et al., Mol. Cell. Biol., 9:303, 1989.
[0415] Kriegler and Botchan, In: Eukaryotic Viral Vectors, Gluzman (Ed.), Cold Spring Harbor: Cold Spring Harbor Laboratory, N Y, 1982.
[0416] Kriegler and Botchan, Mol. Cell. Biol., 3:325, 1983.
[0417] Kriegler et al., Cell, 38:483, 1984.
[0418] Kriegler et al., Cell, 53:45, 1988.
[0419] Kuhl et al., Cell, 50:1057, 1987.
[0420] Kunz et al., Nucl. Acids Res., 17:1121, 1989.
[0421] LaPointe et al., Hypertension, 27(3):715-22, 1996
[0422] LaPointe et al., J. Biol. Chem., 263(19):9075-8, 1988.
[0423] Larsen et al., Proc. Natl. Acad. Sci. USA., 83:8283, 1986.
[0424] Laspia et al., Cell, 59:283, 1989.
[0425] Latimer et al., Mol. Cell. Biol., 10:760, 1990.
[0426] Le Gal La Salle et al., Science, 259:988-990, 1993.
[0427] Lee et al., Nature, 294:228, 1981.
[0428] Levinson et al., Nature, 295:79, 1982.
[0429] Levrero et al., Gene, 101:195-202, 1991.
[0430] Lin et al., Mol. Cell. Biol., 10:850, 1990.
[0431] Long et al., Science 345: 1184-1188, 2014.
[0432] Long et al., Science 351, 400-403, 2016.
[0433] Long et al., JAMA Neurol., 3388, 2016.
[0434] Long et al., Science 351, 400-403, 2016.
[0435] Luria et al., EMBO J., 6:3307, 1987.
[0436] Lusky and Botchan, Proc. Natl. Acad. Sci. USA, 83:3609, 1986.
[0437] Lusky et al., Mol. Cell. Biol., 3:1108, 1983.
[0438] Majors and Varmus, Proc. Natl. Acad. Sci. USA, 80:5866, 1983.
[0439] Mali et al., Science 339, 823-826, 2013a.
[0440] Mali et al., Nat Methods 10, 957-963, 2013b.
[0441] Mali et al., Nat. Biotechnol. 31:833-838, 2013c.
[0442] Mann et al., Cell, 33:153-159, 1983.
[0443] Maresca et al., Genome Research 23, 539-546, 2013.
[0444] Markowitz et al., J. Virol., 62:1120-1124, 1988.
[0445] McNeall et al., Gene, 76:81, 1989.
[0446] Miksicek et al., Cell, 46:203, 1986.
[0447] Millay et al., Nat. Med. 14, 442-447, 2008.
[0448] Mojica et al., J. Mol. Evol. 60, 174-182, 2005.
[0449] Mordacq and Linzer, Genes and Dev., 3:760, 1989.
[0450] Moreau et al., Nucl. Acids Res., 9:6047, 1981.
[0451] Moss et al., J. Gen. Physiol., 108(6):473-84, 1996.
[0452] Muesing et al., Cell, 48:691, 1987.
[0453] Nelson et al., Science 351, 403-407, 2016.
[0454] Nicolas and Rubinstein, In: Vectors: A survey of molecular cloning vectors and their uses, Rodriguez and Denhardt (Eds.), Stoneham: Butterworth, 494-513, 1988.
[0455] Nicolau and Sene, Biochim. Biophys. Acta, 721:185-190, 1982.
[0456] Nicolau et al., Methods Enzymol., 149:157-176, 1987.
[0457] Ondek et al., EMBO J., 6:1017, 1987.
[0458] Omitz et al., Mol. Cell. Biol., 7:3466, 1987.
[0459] Padgett, R. A., Trends Genet. 28, 147-154, 2012.
[0460] Palmiter et al., Cell, 29:701, 1982a.
[0461] Palmiter et al., Nature, 300:611, 1982b.
[0462] Paskind et al., Virology, 67:242-248, 1975.
[0463] Pech et al., Mol. Cell. Biol., 9:396, 1989.
[0464] Perales et al., Proc. Natl. Acad. Sci. USA, 91(9):4086-4090, 1994.
[0465] Perez-Stable and Constantini, Mol. Cell. Biol., 10:1116, 1990.
[0466] Picard et al., Nature, 307:83, 1984.
[0467] Pinkert et al., Genes and Dev., 1:268, 1987.
[0468] Ponta et al., Proc. Natl. Acad. Sci. USA, 82:1020, 1985.
[0469] Porton et al., Mol. Cell. Biol., 10:1076, 1990.
[0470] Potter et al., Proc. Natl. Acad. Sci. USA, 81:7161-7165, 1984.
[0471] Queen and Baltimore, Cell, 35:741, 1983.
[0472] Quinn et al., Mol. Cell. Biol., 9:4713, 1989.
[0473] Racher et al., Biotech. Techniques, 9:169-174, 1995.
[0474] Ragot et al., Nature, 361:647-650, 1993.
[0475] Ran et al., Nature 520, 186-191, 2015.
[0476] Redondo et al., Science, 247:1225, 1990.
[0477] Reisman and Rotter, Mol. Cell. Biol., 9:3571, 1989.
[0478] Renan, Radiother. Oncol., 19:197-218, 1990.
[0479] Resendez Jr. et al., Mol. Cell. Biol., 8:4579, 1988.
[0480] Rich et al., Hum. Gene Ther., 4:461-476, 1993.
[0481] Ridgeway, In: Vectors: A survey of molecular cloning vectors and their uses, Stoneham: Butterworth, 467-492, 1988.
[0482] Ripe et al., Mol. Cell. Biol., 9:2224, 1989.
[0483] Rippe et al., Mol. Cell Biol., 10:689-695, 1990.
[0484] Rittling et al., Nuc. Acids Res., 17:1619, 1989.
[0485] Rosen et al., Cell, 41:813, 1988.
[0486] Rosenfeld et al., Cell, 68:143-155,1992.
[0487] Rosenfeld et al., Science, 252:431-434,1991.
[0488] Roux et al., Proc. Natl. Acad. Sci. USA, 86:9079-9083, 1989.
[0489] Sambrook and Russell, Molecular Cloning: A Laboratory Manual 3^{rd} Ed., Cold Spring Harbor Laboratory Press, 2001.
[0490] Sakai et al., Genes and Dev., 2:1144, 1988.
[0491] Satake et al., J. Virology, 62:970, 1988.
[0492] Schaffner et al., J. Mol. Biol., 201:81, 1988.
[0493] Searle et al., Mol. Cell. Biol., 5:1480, 1985.
[0494] Sharp et al., Cell, 59:229, 1989.
[0495] Shaul and Ben-Levy, EMBO J., 6:1913, 1987.
[0496] Sherman et al., Mol. Cell. Biol., 9:50, 1989.
[0497] Sleigh et al., J. EMBO, 4:3831, 1985.
[0498] Shimizu-Motohashi et al., Am J Transl Res 8, 2471-89, 2016.
[0499] Spalholz et al., Cell, 42:183, 1985.
[0500] Spandau and Lee, J. Virology, 62:427, 1988.
[0501] Spandidos and Wilkie, EMBO J., 2:1193, 1983.
[0502] Stephens and Hentschel, Biochem. J., 248:1, 1987.
[0503] Stratford-Perricaudet and Perricaudet, In: Human Gene Transfer, Cohen-Haguenauer and Boiron (Eds.), John Libbey Eurotext, France, 51-61, 1991.
[0504] Stratford-Perricaudet et al., Hum. Gene. Ther., 1:241-256, 1990.
[0505] Stuart et al., Nature, 317:828, 1985.
[0506] Sullivan and Peterlin, Mol. Cell. Biol., 7:3315, 1987.
[0507] Swartzendruber and Lehman, J. Cell. Physiology, 85:179, 1975.
[0508] Tabebordbar et al., Science 351, 407-411, 2016.
[0509] Takebe et al., Mol. Cell. Biol., 8:466, 1988.
[0510] Tavemier et al., Nature, 301:634, 1983.
[0511] Taylor and Kingston, Mol. Cell. Biol., 10:165, 1990a.
[0512] Taylor and Kingston, Mol. Cell. Biol., 10:176, 1990b.
[0513] Taylor et al., J. Biol. Chem., 264:15160, 1989.
[0514] Temin, In: Gene Transfer, Kucherlapati (Ed.), NY, Plenum Press, 149-188, 1986.
[0515] Thiesen et al., J. Virology, 62:614, 1988.
[0516] Top et al., J. Infect. Dis., 124:155-160, 1971.
[0517] Tóth et al., Biology Direct, 1-14, 2016.
[0518] Tronche et al., Mol. Biol. Med., 7:173, 1990.
[0519] Trudel and Constantini, Genes and Dev. 6:954, 1987.
[0520] Tsai et al., Nature Biotechnology 34, 882-887, 2016.
[0521] Tur-Kaspa et al., Mol. Cell Biol., 6:716-718, 1986.
[0522] Tyndell et al., Nuc. Acids. Res., 9:6231, 1981.
[0523] Vannice and Levinson, J. Virology, 62:1305, 1988.
[0524] Varmus et al., Cell, 25:23-36, 1981.
[0525] Vasseur et al., Proc Natl. Acad. Sci. U.S.A., 77:1068, 1980.
[0526] Wagner et al., Proc. Natl. Acad. Sci. USA, 87(9):3410-3414, 1990.
[0527] Walmsley et al., PLoS ONE 5, e8647, 2010.
[0528] Wang and Calame, Cell, 47:241, 1986.
[0529] Wang et al., Cell, 153:910-910, 2013.
[0530] Weber et al., Cell, 36:983, 1984.
[0531] Weinberger et al. Mol. Cell. Biol., 8:988, 1984.
[0532] Winoto et al., Cell, 59:649, 1989.
[0533] Wong et al., Gene, 10:87-94, 1980.
[0534] Wu and Wu, Adv. Drug Delivery Rev., 12:159-167, 1993.
[0535] Wu and Wu, Biochemistry, 27:887-892, 1988.
[0536] Wu and Wu, J. Biol. Chem., 262:4429-4432, 1987.
[0537] Wu et al., Cell Stem Cell 13, 659-662, 2013.
[0538] Wu et al., Nat Biotechnol 32, 670-676, 2014.
[0539] Xu et al., Mol Ther 24, 564-569, 2016.
[0540] Yamauchi-Takihara et al., Proc. Natl. Acad. Sci. USA, 86(10):3504-3508, 1989.
[0541] Yang et al., Proc. Natl. Acad. Sci. USA, 87:9568-9572, 1990.
[0542] Yin et al., Nat Biotechnol 32, 551-553, 2014.
[0543] Yin et al., Physiol Rev 93, 23-67, 2013.
[0544] Young et al., Cell Stem Cell 18, 533-540, 2016.
[0545] Yutzey et al. Mol. Cell. Biol., 9:1397, 1989.
[0546] Zechner et al., Cell Metabolism 12, 633-642, 2010.
[0547] Zelenin et al., FEBS Lett., 280:94-96, 1991.
[0548] Zetsche et al., Cell 163, 759-771, 2015.
[0549] Ziober and Kramer, J. Bio. Chem., 271(37):22915-22922, 1996.
[0550] Campbell and Kahl, 338(6212):259-62, 1989.
[0551] Le Rumeur E. Bosn J Basic Med Sci. 15(3): 14-20, 2015.
[0552] Monaco et al., xdgGenomics 2(1):90-5, 1988.
[0553] Allen et al., Physiol Rev. 96(1):253-305, 2016.
[0554] Kyrychenko et al., Cardiovasc Res. 97(4):666-75, 2013.
[0555] Beggs et al., Am J Hum Genet. 49(1):54-67, 1991.
[0556] Aartsma-Rus et al., Muscle Nerve. 34(2): 135-44, 2006.
[0557] Tuffery-Giraud et al., Hum Mutat. 30(6):934-45, 2009.
[0558] Bladen et al., Hum Mutat. 36(4):395-402, 2015.
[0559] Yang et al., BMC Med Genet. 14:29, 2013.
[0560] Nakamura et al., J Clin Neurosci. 15(7):757-63, 2008.
[0561] Bengtsson et al., Nat Commun. 8:14454, 2017.
[0562] Li et al., Stem Cell Reports 4(1):143-54, 2015.
[0563] Long et al., Science 351(6271):400-3, 2016.
[0564] Long et al., Science 345(6201):1184-8, 2014.
[0565] Ousterout et al., Nat Commun. 6(6244), 2015.
[0566] Yu et al., Science Advances 3(4):e1602814, 2017.
[0567] Gregorevic et al., Nat Med. 12(7):787-9, 2006.
[0568] Sakamoto et al., Biochem Biophys Res Commun. 293(4): 1265-72, 2002.
[0569] Yue et al., Hum Mol Genet. 24(20):5880-90, 2015.
[0570] Toh et al., PLoS One 11(1):e0145620, 2016.
[0571] Young et al., Cell Stem Cell. 18(4):533-40, 2016.
[0572] Tabebordbar et al. Science 351(6271):407-11, 2016.
[0573] Nelson et al., Science 351(6271):403-7, 2016.
[0574] Xu et al., Mol Ther. 24(3):564-9, 2016.
[0575] Corrado et al., FEBS Lett. 344(2-3):255-60, 1994.
[0576] Henderson et al., Proc Natl Acad Sci USA 107(21):9632-7, 2010.
[0577] Levine et al., FEBS Lett. 298(1):44-8, 1992.
[0578] Sutherland-Smith et al., J Mol Biol. 329(1): 15-33, 2003.
[0579] Wein et al., Nat Med. 20(9):992-1000, 2014.
[0580] Lattanzi et al., Mol Ther Nucleic Acids 7:11-9, 2017.
[0581] Bish et al., Mol Ther. 20(3):580-9, 2012.
[0582] Echigoya et al., Proc Natl Acad Sci USA 114(16):4213-8, 2017.
[0583] Kaspar et al., Circ Cardiovasc Genet. 2(6):544-51, 2009.
[0584] Novakovic et al., Ann NY Acad Sci. 1048:406-10, 2005.
[0585] Singh et al., Proc Natl Acad Sci USA 107(34):15069-74, 2010.
[0586] Heald et al., Neurology 44(12):2388-90, 1994.
[0587] Nakamura et al., J Hum Genet. 61(7):663-7, 2016.
[0588] Matsa et al., Physiol Rev. 96(3): 1093-126, 2016.
[0589] Tiburcy et al., Circulation. 135(19): 1832-47, 2017.
[0590] Talsness et al., Proc Natl Acad Sci USA 112(40): 12414-9, 2015.
[0591] Fletcher et al., Mol Ther Nucleic Acids 1: e48, 2012.
[0592] Winnard et al., Am J Hum Genet. 56(1): 158-66, 1995.
[0593] Guan et al., Stem Cell Res. 12(2):467-80, 2014.
[0594] Lin et al., Dis Model Mech. 8(5):457-66, 2015.
[0595] Rajdev and Groh, Card Electrophysiol Clin. 7(2):303-8, 2015.
[0596] Yumlu et al., Methods. 121-122:29-44, 2017.
[0597] Veres et al., Cell Stem Cell 15(1):27-30, 2014.
[0598] Yang et al., Nat Commun. 5:5507, 2014.
[0599] Aartsma-Rus et al., J Med Genet. 53(3): 145-51, 2016.
[0600] Odom et al., Mol Ther. 19(1):36-45, 2011.
[0601] Banks et al., Hum Mol Genet. 16(17):2105-13, 2007.
[0602] Acsadi et al., J Biol Chem. 287(22):18153-62, 2012.
[0603] Corrado et al., J Cell Biol. 134(4):873-84, 1996.
[0604] van Putten et al., PLoS One 7(2):e31937, 2012.
[0605] Wells et al., Hum Mol Genet. 4(8):1245-50, 1995.
[0606] Neri et al., Neuromuscul Disord. 17(11-12):913-8, 2007.
[0607] Young et al., J Neuromuscul Dis. 4(2): 139-45, 2017.
[0608] Ran et al., Nat Protoc. 8(11):2281-308, 2013.
[0609] Burridge et al., Nat Methods. 11(8):855-60, 2014.

The application's sequence listing, which the Patent Office published only in electronic form, follows.

SEQUENCE LISTING (133 sequences)

SEQ ID NO: 1 - DNA, 20 bp, Homo sapiens
aattaatctgccgaagatga

SEQ ID NO: 2 - DNA, 20 bp, Homo sapiens
aaaagcgctttttggatagg

SEQ ID NO: 3 - DNA, 20 bp, Homo sapiens
tgcagtatgctccatccata

SEQ ID NO: 4 - DNA, 20 bp, Homo sapiens
tgtcaattcaaatggtgcac

SEQ ID NO: 5 - DNA, 20 bp, Homo sapiens
aaacaaaccagctcttcacg

SEQ ID NO: 6 - RNA, 20 nt, Homo sapiens
aauuaaucugccgaagauga

SEQ ID NO: 7 - RNA, 20 nt, Homo sapiens
aaaagcgcuuuuuggauagg

SEQ ID NO: 8 - RNA, 20 nt, Homo sapiens
ugcaguaugcuccauccaua

SEQ ID NO: 9 - RNA, 20 nt, Homo sapiens
ugucaauucaaauggugcac

SEQ ID NO: 10 - RNA, 20 nt, Homo sapiens
aaacaaaccagcucuucacg

SEQ ID NO: 11 - DNA, 20 bp, Mus musculus
tagtctctagaggacgttca

SEQ ID NO: 12 - DNA, 20 bp, Mus musculus
tgttgtcatgaggcctatct

SEQ ID NO: 13 - RNA, 20 nt, Mus musculus
uagucucuagaggacguuca

SEQ ID NO: 14 - RNA, 20 nt, Mus musculus
uguugucaugaggccuaucu

SEQ ID NO: 15 - protein, 3685 aa, Homo sapiens
MLWWEEVEDCYEREDVQKKTFTKWVNAQFSKFGKQHIENLFSDLQDGRRLLDLLEGLTGQKLPKEKGSTRVHALNNVNKALRVLQNNNVDLVNIGSTDIVDGNHKLTLGLIWNIILHWQVKNVMKNIMAGLQQTNSEKILLSWVRQSTRNYPQVNVINFTTSWSDGLALNALIHSHRPDLFDWNSVVCQQSATQRLEHAFNIARYQLGIEKLLDPEDVDTTYPDKKSILMYITSLFQVLPQQVSIEAIQEVEMLPRPPKVTKEEHFQLHHQMHYSQQITVSLAQGYERTSSPKPRFKSYAYTQAAYVTTSDPTRSPFPSQHLEAPEDKSFGSSLMESEVNLDRYQTALEEVLSWLLSAEDTLQAQGEISNDVEVVKDQFHTHEGYMMDLTAHQGRVGNILQLGSKLIGTGKLSEDEETEVQEQMNLLNSRWECLRVASMEKQSNLHRVLMDLQNQKLKELNDWLTKTEERTRKMEEEPLGPDLEDLKRQVQQHKVLQEDLEQEQVRVNSLTHMVVVVDESSGDHATAALEEQLKVLGDRWANICRWTEDRWVLLQDILLKWQRLTEEQCLFSAWLSEKEDAVNKIHTTGFKDQNEMLSSLQKLAVLKADLEKKKQSMGKLYSLKQDLLSTLKNKSVTQKTEAWLDNFARCWDNLVQKLEKSTAQISQAVTTTQPSLTQTTVMETVTTVTTREQILVKHAQEELPPPPPQKKRQITVDSEIRKRLDVDITELHSWITRSEAVLQSPEFAIFRKEGNFSDLKEKVNAIEREKAEKFRKLQDASRSAQALVEQMVNEGVNADSIKQASEQLNSRWIEFCQLLSERLNWLEYQNNIIAFYNQLQQLEQMTTTAENWLKIQPTTPSEPTAIKSQLKICKDEVNRLSGLQPQIERLKIQSIALKEKGQGPMFLDADFVAFTNHFKQVFSDVQAREKELQTIFDTLPPMRYQETMSAIRTWVQQSETKLSIPQLSVTDYEIMEQRLGELQALQSSLQEQQSGLYYLSTTVKEMSKKAPSEISRKYQSEFEEIEGRWKKLSSQLVEHCQKLEEQMNKLRKIQNHIQTLKKWMAEVDVFLKEEWPALGDSEILKKQLKQCRLLVSDIQTIQPSLNSVNEGGQKIKNEAEPEFASRLETELKELNTQWDHMCQQVYARKEALKGGLEKTVSLQKDLSEMHEWMTQAEEEYLERDFEYKTPDELQKAVEEMKRAKEEAQQKEAKVKLLTESVNSVIAQAPPVAQEALKKELETLTTNYQWLCTRLNGKCKTLEEVWACWHELLSYLEKANKWLNEVEFKLKTTENIPGGAEEISEVLDSLENLMRHSEDNPNQIRILAQTLTDGGVMDELINEELETFNSRWRELHEEAVRRQKLLEQSIQSAQETEKSLHLIQESLTFIDKQLAAYIADKVDAAQMPQEAQKIQSDLTSHEISLEEMKKHNQGKEAAQRVLSQIDVAQKKLQDVSMKFRLFQKPANFELRLQESKMILDEVKMHLPALETKSVEQEVVQSQLNHCVNLYKSLSEVKSEVEMVIKTGRQIVQKKQTENPKELDERVTALKLHYNELGAKVTERKQQLEKCLKLSRKMRKEMNVLTEWLAATDMELTKRSAVEGMPSNLDSEVAWGKATQKEIEKQKVHLKSITEVGEALKTVLGKKETLVEDKLSLLNSNWIAVTSRAEEWLNLLLEYQKHMETFDQNVDHITKWIIQADTLLDESEKKKPQQKEDVLKRLKAELNDIRPKVDSTRDQAANLMANRGDHCRKLVEPQISELNHRFAAISHRIKTGKASIPLKELEQFNSDIQKLLEPLEAEIQQGVNLKEEDFNKDMNEDNEGTVKELLQRGDNLQQRITDERKREEIKIKQQLLQTKHNALKDLRSQRRKKALEISHQWYQYKRQADDLLKCLDDIEKKLASLPEPRDERKIKEIDRELQKKKEELNAVRRQAEGLSEDGAAMAVEPTQIQLSKRWREIESKFAQFRRLNFAQIHTVREETMMVMTEDMPLEISYVPSTYLTEITHVSQALLEVEQLLNAPDLCAKDFEDLFKQEESLKNIKDSLQQSSGRIDIIHSKKTAALQSATPVERVKLQEALSQLDFQWEKVNKMYKDRQGRFDRSVEKWRRFHYDIKIFNQWLTEAEQFLRKTQIPENWEHAKYKWYLKELQDGIGQRQTVVRTLNATGEEIIQQSSKTDASILQEKLGSLNLRWQEVCKQLSDRKKRLEEQKNILSEFQRDLNEFVLWLEEADNIASIPLEPGKEQQLKEKLEQVKLLVEELPLRQGILKQLNETGGPVLVSAPISPEEQDKLENKLKQTNLQWIKVSRALPEKQGEIEAQIKDLGQLEKKLEDLEEQLNHLLLWLSPIRNQLEIYNQPNQEGPFDVQETEIAVQAKQPDVEEILSKGQHLYKEKPATQPVKRKLEDLSSEWKAVNRLLQELRAKQPDLAPGLTTIGASPTQTVTLVTQPVVTKETAISKLEMPSSLMLEVPALADFNRAWTELTDWLSLLDQVIKSQRVMVGDLEDINEMIIKQKATMQDLEQRRPQLEELITAAQNLKNKTSNQEARTIITDRIERIQNQWDEVQEHLQNRRQQLNEMLKDSTQWLEAKEEAEQVLGQARAKLESWKEGPYTVDAIQKKITETKQLAKDLRQWQTNVDVANDLALKLLRDYSADDTRKVHMITENINASWRSIHKRVSEREAALEETHRLLQQFPLDLEKFLAWLTEAETTANVLQDATRKERLLEDSKGVKELMKQWQDLQGEIEAHTDVYHNLDENSQKILRSLEGSDDAVLLQRRLDNMNFKWSELRKKSLNIRSHLEASSDQWKRLHLSLQELLVWLQLKDDELSRQAPIGGDFPAVQKQNDVHRAFKRELKTKEPVIMSTLETVRIFLTEQPLEGLEKLYQEPRELPPEERAQNVTRLLRKQAEEVNTEWEKLNLHSADWQRKIDETLERLQELQEATDELDLKLRQAEVIKGSWQPVGDLLIDSLQDHLEKVKALRGEIAPLKENVSHVNDLARQLTTLGIQLSPYNLSTLEDLNTRWKLLQVAVEDRVRQLHEAHRDFGPASQHFLSTSVQGPWERAISPNKVPYYINHETQTTCWDHPKMTELYQSLADLNNVRFSAYRTAMKLRRLQKALCLDLLSLSAACDALDQHNLKQNDQPMDILQIINCLTTIYDRLEQEHNNLVNVPLCVDMCLNWLLNVYDTGRTGRIRVLSFKTGIISLCKAHLEDKYRYLFKQVASSTGFCDQRRLGLLLHDSIQIPRQLGEVASFGGSNIEPSVRSCFQFANNKPEIEAALFLDWMRLEPQSMVWLPVLHRVAAAETAKHQAKCNICKECPIIGFRYRSLKHFNYDICQSCFFSGRVAKGHKMHYPMVEYCTPTTSGEDVRDFAKVLKNKFRTKRYFAKHPRMGYLPVQTVLEGDNMETPVTLINFWPVDSAPASSPQLSHDDTHSRIEHYASRLAEMENSNGSYLNDSISPNESIDDEHLLIQHYCQSLNQDSPLSQPRSPAQILISLESEERGELERILADLEEENRNLQAEYDRLKQQHEHKGLSPLPSPPEMMPTSPQSPRDAELIAEAKLLRQHKGRLEARMQILEDHNKQLESQLHRLRQLLEQPQAEAKVNGTTVSSPSTSLQRSDSSQPMLLRVVGSQTSDSMGEEDLLSPPQDTSTGLEEVMEQLNNSFPSSRGRNTPGKPMREDTM

SEQ ID NO: 16 - DNA, 14069 bp, Homo sapiens
cgttaaatgcaaacgctgctctggctcatgtgtttgctccgaggtataggttttgttcgactgacgtatcagatagtcagagtggttaccacaccgacgttgtagcagctgcataataaatgactgaaagaatcatgttaggcatgcccacctaacctaacttgaatcatgcgaaaggggagctgttggaattcaaatagactttctggttcccagcagtcggcagtaatagaatgctttcaggaagatgacagaatcaggagaaagatgctgttttgcactatcttgatttgttacagcagccaacttattggcatgatggagtgacaggaaaaacagctggcatggaagatgaaagagaagatgttcaaaagaaaacattcacaaaatgggtaaatgcacaattttctaagtttgggaagcagcatattgagaacctcttcagtgacctacaggatgggaggcgcctcctagacctcctcgaaggcctgacagggcaaaaactgccaaaagaaaaaggatccacaagagttcatgccctgaacaatgtcaacaaggcactgcgggttttgcagaacaataatgttgatttagtgaatattggaagtactgacatcgtagatggaaatcataaactgactcttggtttgatttggaatataatcctccactggcaggtcaaaaatgtaatgaaaaatatcatggctggattgcaacaaaccaacagtgaaaagattctcctgagctgggtccgacaatcaactcgtaattatccacaggttaatgtaatcaacttcaccaccagctggtctgatggcctggctttgaatgctctcatccatagtcataggccagacctatttgactggaatagtgtggtttgccagcagtcagccacacaacgactggaacatgcattcaacatcgccagatatcaattaggcatagagaaactactcgatcctgaagatgttgataccacctatccagataagaagtccatcttaatgtacatcacatcactcttccaagttttgcctcaacaagtgagcattgaagccatccaggaagtggaaatgttgccaaggccacctaaagtgactaaagaagaacattttcagttacatcatcaaatgcactattctcaacagatcacggtcagtctagcacagggatatgagagaacttcttcccctaagcctcgattcaagagctatgcctacacacaggctgcttatgtcaccacctctgaccctacacggagcccatttccttcacagcatttggaagctcctgaagacaagtcatttggcagttcattgatggagagtgaagtaaacctggaccgttatcaaacagctttagaagaagtattatcgtggcttctttctgctgaggacacattgcaagcacaaggagagatttctaatgatgtggaagtggtgaaagaccagtttcatactcatgaggggtacatgatggatttgacagcccatcagggccgggttggtaatattctacaattgggaagtaagctgattggaacaggaaaattatcagaagatgaagaaactgaagtacaagagcagatgaatctcctaaattcaagatgggaatgcctcagggtagctagcatggaaaaacaaagcaatttacatagagttttaatggatctccagaatcagaaactgaaagagttgaatgactggctaacaaaaacagaagaaagaacaaggaaaatggaggaagagcctcttggacctgatcttgaagacctaaaacgccaagtacaacaacataaggtgcttcaagaagatctagaacaagaacaagtcagggtcaattctctcactcacatggtggtggtagttgatgaatctagtggagatcacgcaactgctgctttggaagaacaacttaaggtattgggagatcgatgggcaaacatctgtagatggacagaagaccgctgggttcttttacaagacatccttctcaaatggcaacgtcttactgaagaacagtgcctttttagtgcatggctttcagaaaaagaagatgcagtgaacaagattcacacaactggctttaaagatcaaaatgaaatgttatcaagtcttcaaaaactggccgttttaaaagcggatctagaaaagaaaaagcaatccatgggcaaactgtattcactcaaacaagatcttctttcaacactgaagaataagtcagtgacccagaagacggaagcatggctggataactttgcccggtgttgggataatttagtccaaaaacttgaaaagagtacagcacagatttcacaggctgtcaccaccactcagccatcactaacacagacaactgtaatggaaacagtaactacggtgaccacaagggaacagatcctggtaaagcatgctcaagaggaacttccaccaccacctccccaaaagaagaggcagattactgtggattctgaaattaggaaaaggttggatgttgatataactgaacttcacagctggattactcgctcagaagctgtgttgcagagtcctgaatttgcaatctttcggaaggaaggcaacttctcagacttaaaagaaaaagtcaatgccatagagcgagaaaaagctgagaagttcagaaaactgcaagatgccagcagatcagctcaggccctggtggaacagatggtgaatgagggtgttaatgcagatagcatcaaacaagcctcagaacaactgaacagccggtggatcgaattctgccagttgctaagtgagagacttaactggctggagtatcagaacaacatcatcgctttctataatcagctacaacaattggagcagatgacaactactgctgaaaactggttgaaaatccaacccaccaccccatcagagccaacagcaattaaaagtcagttaaaaatttgtaaggatgaagtcaaccggctatcaggtcttcaacctcaaattgaacgattaaaaattcaaagcatagccctgaaagagaaaggacaaggacccatgttcctggatgcagactttgtggcctttacaaatcattttaagcaagtcttttctgatgtgcaggccagagagaaagagctacagacaatttttgacactttgccaccaatgcgctatcaggagaccatgagtgccatcaggacatgggtccagcagtcagaaaccaaactctccatacctcaacttagtgtcaccgactatgaaatcatggagcagagactcggggaattgcaggctttacaaagttctctgcaagagcaacaaagtggcctatactatctcagcaccactgtgaaagagatgtcgaagaaagcgccctctgaaattagccggaaatatcaatcagaatttgaagaaattgagggacgctggaagaagctctcctcccagctggttgagcattgtcaaaagctagaggagcaaatgaataaactccgaaaaattcagaatcacatacaaaccctgaagaaatggatggctgaagttgatgtttttctgaaggaggaatggcctgcccttggggattcagaaattctaaaaaagcagctgaaacagtgcagacttttagtcagtgatattcagacaattcagcccagtctaaacagtgtcaatgaaggtgggcagaagataaagaatgaagcagagccagagtttgcttcgagacttgagacagaactcaaagaacttaacactcagtgggatcacatgtgccaacaggtctatgccagaaaggaggccttgaagggaggtttggagaaaactgtaagcctccagaaagatctatcagagatgcacgaatggatgacacaagctgaagaagagtatcttgagagagattttgaatataaaactccagatgaattacagaaagcagttgaagagatgaagagagctaaagaagaggcccaacaaaaagaagcgaaagtgaaactccttactgagtctgtaaatagtgtcatagctcaagctccacctgtagcacaagaggccttaaaaaaggaacttgaaactctaaccaccaactaccagtggctctgcactaggctgaatgggaaatgcaagactttggaagaagtttgggcatgttggcatgagttattgtcatacttggagaaagcaaacaagtggctaaatgaagtagaatttaaacttaaaaccactgaaaacattcctggcggagctgaggaaatctctgaggtgctagattcacttgaaaatttgatgcgacattcagaggataacccaaatcagattcgcatattggcacagaccctaacagatggcggagtcatggatgagctaatcaatgaggaacttgagacatttaattctcgttggagggaactacatgaagaggctgtaaggaggcaaaagttgcttgaacagagcatccagtctgcccaggagactgaaaaatccttacacttaatccaggagtccctcacattcattgacaagcagttggcagcttatattgcagacaaggtggacgcagctcaaatgcctcaggaagcccagaaaatccaatctgatttgacaagtcatgagatcagtttagaagaaatgaagaaacataatcaggggaaggaggctgcccaaagagtcctgtctcagattgatgttgcacagaaaaaattacaagatgtctccatgaagtttcgattattccagaaaccagccaattttgagcagcgtctacaagaaagtaagatgattttagatgaagtgaagatgcacttgcctgcattggaaacaaagagtgtggaacaggaagtagtacagtcacagctaaatcattgtgtgaacttgtataaaagtctgagtgaagtgaagtctgaagtggaaatggtgataaagactggacgtcagattgtacagaaaaagcagacggaaaatcccaaagaacttgatgaaagagtaacagctttgaaattgcattataatgagctgggagcaaaggtaacagaaagaaagcaacagttggagaaatgcttgaaattgtcccgtaagatgcgaaaggaaatgaatgtcttgacagaatggctggcagctacagatatggaattgacaaagagatcagcagttgaaggaatgcctagtaatttggattctgaagttgcctggggaaaggctactcaaaaagagattgagaaacagaaggtgcacctgaagagtatcacagaggtaggagaggccttgaaaacagttttgggcaagaaggagacgttggtggaagataaactcagtcttctgaatagtaactggatagctgtcacctcccgagcagaagagtggttaaatcttttgttggaataccagaaacacatggaaacttttgaccagaatgtggaccacatcacaaagtggatcattcaggctgacacacttttggatgaatcagagaaaaagaaaccccagcaaaaagaagacgtgcttaagcgtttaaaggcagaactgaatgacatacgcccaaaggtggactctacacgtgaccaagcagcaaacttgatggcaaaccgcggtgaccactgcaggaaattagtagagccccaaatctcagagctcaaccatcgatttgcagccatttcacacagaattaagactggaaaggcctccattcctttgaaggaattggagcagtttaactcagatatacaaaaattgcttgaaccactggaggctgaaattcagcagggggtgaatctgaaagaggaagacttcaataaagatatgaatgaagacaatgagggtactgtaaaagaattgttgcaaagaggagacaacttacaacaaagaatcacagatgagagaaagcgagaggaaataaagataaaacagcagctgttacagacaaaacataatgctctcaaggatttgaggtctcaaagaagaaaaaaggctctagaaatttctcatcagtggtatcagtacaagaggcaggctgatgatctcctgaaatgcttggatgacattgaaaaaaaattagccagcctacctgagcccagagatgaaaggaaaataaaggaaattgatcgggaattgcagaagaagaaagaggagctgaatgcagtgcgtaggcaagctgagggcttgtctgaggatggggccgcaatggcagtggagccaactcagatccagctcagcaagcgctggcgggaaattgagagcaaatttgctcagtttcgaagactcaactttgcacaaattcacactgtccgtgaagaaacgatgatggtgatgactgaagacatgcctttggaaatttcttatgtgccttctacttatttgactgaaatcactcatgtctcacaagccctattagaagtggaacaacttctcaatgctcctgacctctgtgctaaggactttgaagatctctttaagcaagaggagtctctgaagaatataaaagatagtctacaacaaagctcaggtcggattgacattattcatagcaagaagacagcagcattgcaaagtgcaacgcctgtggaaagggtgaagctacaggaagctctctcccagcttgatttccaatgggaaaaagttaacaaaatgtacaaggaccgacaagggcgatttgacagatctgttgagaaatggcggcgttttcattatgatataaagatatttaatcagtggctaacagaagctgaacagtttctcagaaagacacaaattcctgagaattgggaacatgctaaatacaaatggtatcttaaggaactccaggatggcattgggcagcggcaaactgttgtcagaacattgaatgcaactggggaagaaataattcagcaatcctcaaaaacagatgccagtattctacaggaaaaattgggaagcctgaatctgcggtggcaggaggtctgcaaacagctgtcagacagaaaaaagaggctagaagaacaaaagaatatcttgtcagaatttcaaagagatttaaatgaatttgttttatggttggaggaagcagataacattgctagtatcccacttgaacctggaaaagagcagcaactaaaagaaaagcttgagcaagtcaagttactggtggaagagttgcccctgcgccagggaattctcaaacaattaaatgaaactggaggacccgtgcttgtaagtgctcccataagcccagaagagcaagataaacttgaaaataagctcaagcagacaaatctccagtggataaaggtttccagagctttacctgagaaacaaggagaaattgaagctcaaataaaagaccttgggcagcttgaaaaaaagcttgaagaccttgaagagcagttaaatcatctgctgctgtggttatctcctattaggaatcagttggaaatttataaccaaccaaaccaagaaggaccatttgacgttcaggaaactgaaatagcagttcaagctaaacaaccggatgtggaagagattttgtctaaagggcagcatttgtacaaggaaaaaccagccactcagccagtgaagaggaagttagaagatctgagctctgagtggaaggcggtaaaccgtttacttcaagagctgagggcaaagcagcctgacctagctcctggactgaccactattggagcctctcctactcagactgttactctggtgacacaacctgtggttactaaggaaactgccatctccaaactagaaatgccatcttccttgatgttggaggtacctgctctggcagatttcaaccgggcttggacagaacttaccgactggctttctctgcttgatcaagttataaaatcacagagggtgatggtgggtgaccttgaggatatcaacgagatgatcatcaagcagaaggcaacaatgcaggatttggaacagaggcgtccccagttggaagaactcattaccgctgcccaaaatttgaaaaacaagaccagcaatcaagaggctagaacaatcattacggatcgaattgaaagaattcagaatcagtgggatgaagtacaagaacaccttcagaaccggaggcaacagttgaatgaaatgttaaaggattcaacacaatggctggaagctaaggaagaagctgagcaggtcttaggacaggccagagccaagcttgagtcatggaaggagggtccctatacagtagatgcaatccaaaagaaaatcacagaaaccaagcagttggccaaagacctccgccagtggcagacaaatgtagatgtggcaaatgacttggccctgaaacttctccgggattattctgcagatgataccagaaaagtccacatgataacagagaatatcaatgcctcttggagaagcattcataaaagggtgagtgagcgagaggctgctttggaagaaactcatagattactgcaacagttccccctggacctggaaaagtttcttgcctggcttacagaagctgaaacaactgccaatgtcctacaggatgctacccgtaaggaaaggctcctagaagactccaagggagtaaaagagctgatgaaacaatggcaagacctccaaggtgaaattgaagctcacacagatgtttatcacaacctggatgaaaacagccaaaaaatcctgagatccctggaaggttccgatgatgcagtcctgttacaaagacgtttggataacatgaacttcaagtggagtgaacttcggaaaaagtctctcaacattaggtcccatttggaagccagttctgaccagtggaagcgtctgcacctttctctgcaggaacttctggtgtggctacagctgaaagatgatgaattaagccggcaggcacctattggaggcgactttccagcagttcagaagcagaacgatgtacatagggccttcaagagggaattgaaaactaaagaacctgtaatcatgagtactcttgagactgtacgaatatttctgacagagcagcctttggaaggactagagaaactctaccaggagcccagagagctgcctcctgaggagagagcccagaatgtcactcggcttctacgaaagcaggctgaggaggtcaatactgagtgggaaaaattgaacctgcactccgctgactggcagagaaaaatagatgagacccttgaaagactccaggaacttcaagaggccacggatgagctggacctcaagctgcgccaagctgaggtgatcaagggatcctggcagcccgtgggcgatctcctcattgactctctccaagatcacctcgagaaagtcaaggcacttcgaggagaaattgcgcctctgaaagagaacgtgagccacgtcaatgaccttgctcgccagcttaccactttgggcattcagctctcaccgtataacctcagcactctggaagacctgaacaccagatggaagcttctgcaggtggccgtcgaggaccgagtcaggcagctgcatgaagcccacagggactttggtccagcatctcagcactttctttccacgtctgtccagggtccctgggagagagccatctcgccaaacaaagtgccctactatatcaaccacgagactcaaacaacttgctgggaccatcccaaaatgacagagctctaccagtctttagctgacctgaataatgtcagattctcagcttataggactgccatgaaactccgaagactgcagaaggccctttgcttggatctcttgagcctgtcagctgcatgtgatgccttggaccagcacaacctcaagcaaaatgaccagcccatggatatcctgcagattattaattgtttgaccactatttatgaccgcctggagcaagagcacaacaatttggtcaacgtccctctctgcgtggatatgtgtctgaactggctgctgaatgtttatgatacgggacgaacagggaggatccgtgtcctgtcttttaaaactggcatcatttccctgtgtaaagcacatttggaagacaagtacagataccttttcaagcaagtggcaagttcaacaggattttgtgaccagcgcaggctgggcctccttctgcatgattctatccaaattccaagacagttgggtgaagttgcatcctttgggggcagtaacattgagccaagtgtccggagctgcttccaatttgctaataataagccagagatcgaagcggccctcttcctagactggatgagactggaaccccagtccatggtgtggctgcccgtcctgcacagagtggctgctgcagaaactgccaagcatcaggccaaatgtaacatctgcaaagagtgtccaatcattggattcaggtacaggagtctaaagcactttaattatgacatctgccaaagctgctttttttctggtcgagttgcaaaaggccataaaatgcactatcccatggtggaatattgcactccgactacatcaggagaagatgttcgagactttgccaaggtactaaaaaacaaatttcgaaccaaaaggtattttgcgaagcatccccgaatgggctacctgccagtgcagactgtcttagagggggacaacatggaaactcccgttactctgatcaacttctggccagtagattctgcgcctgcctcgtcccctcagctttcacacgatgatactcattcacgcattgaacattatgctagcaggctagcagaaatggaaaacagcaatggatcttatctaaatgatagcatctctcctaatgagagcatagatgatgaacatttgttaatccagcattactgccaaagtttgaaccaggactcccccctgagccagcctcgtagtcctgcccagatcttgatttccttagagagtgaggaaagaggggagctagagagaatcctagcagatcttgaggaagaaaacaggaatctgcaagcagaatatgaccgtctaaagcagcagcacgaacataaaggcctgtccccactgccgtcccctcctgaaatgatgcccacctctccccagagtccccgggatgctgagctcattgctgaggccaagctactgcgtcaacacaaaggccgcctggaagccaggatgcaaatcctggaagaccacaataaacagctggagtcacagttacacaggctaaggcagctgctggagcaaccccaggcagaggccaaagtgaatggcacaacggtgtcctctccttctacctctctacagaggtccgacagcagtcagcctatgctgctccgagtggttggcagtcaaacttcggactccatgggtgaggaagatcttctcagtcctccccaggacacaagcacagggttagaggaggtgatggagcaactcaacaactccttccctagttcaagaggaagaaatacccctggaaagccaatgagagaggacacaatgtaggaagtcttttccacatggcagatgatttgggcagagcgatggagtccttagtatcagtcatgacagatgaagaaggagcagaataaatgttttacaactcctgattcccgcatggtttttataatattcatacaacaaagaggattagacagtaagagtttacaagaaataaatctatatttttgtgaagggtagtggtattatactgtagatttcagtagtttctaagtctgttattgttttgttaacaatggcaggttttacacgtctatgcaattgtacaaaaaagttataagaaaactacatgtaaaatcttgatagctaaataacttgccatttctttatatggaacgcattttgggttgtttaaaaatttataacagttataaagaaagattgtaaactaaagtgtgctttataaaaaaaagttgtttataaaaacccctaaaaacaaaacaaacacacacacacacacatacacacacacacacaaaactttgaggcagcgcattgttttgcatccttttggcgtgatatccatatgaaattcatggctttttctttttttgcatattaaagataagacttcctctaccaccacaccaaatgactactacacactgctcatttgagaactgtcagctgagtggggcaggcttgagttttcatttcatatatctatatgtctataagtatataaatactatagttatatagataaagagatacgaatttctatagactgactttttccattttttaaatgttcatgtcacatcctaatagaaagaaattacttctagtcagtcatccaggcttacctgcttggtctagaatggatttttcccggagccggaagccaggaggaaactacaccacactaaaacattgtctacagctccagatgtttctcattttaaacaactttccactgacaacgaaagtaaagtaaagtattggatttttttaaagggaacatgtgaatgaatacacaggacttattatatcagagtgagtaatcggttggttggttgattgattgattgattgatacattcagcttcctgctgctagcaatgccacgatttagatttaatgatgcttcagtggaaatcaatcagaaggtattctgaccttgtgaacatcagaaggtattttttaactcccaagcagtagcaggacgatgatagggctggagggctatggattcccagcccatccctgtgaaggagtaggccactctttaagtgaaggattggatgattgttcataatacataaagttctctgtaattacaactaaattattatgccctcttctcacagtcaaaaggaactgggtggtttggtttttgttgcttttttagatttattgtcccatgtgggatgagtttttaaatgccacaagacataatttaaaataaataaactttgggaaaaggtgtaaaacagtagccccatcacatttgtgatactgacaggtatcaacccagaagcccatgaactgtgtttccatcctttgcatttctctgcgagtagttccacacaggtttgtaagtaagtaagaaagaaggcaaattgattcaaatgttacaaaaaaacccttcttggtggattagacaggttaaatatataaacaaacaaacaaaaattgctcaaaaaagaggagaaaagctcaagaggaaaagctaaggactggtaggaaaaagctttactctttcatgccattttatttctttttgatttttaaatcattcattcaatagataccaccgtgtgacctataattttgcaaatctgttacctctgacatcaagtgtaattagcttttggagagtgggctgacatcaagtgtaattagcttttggagagtgggttttgtccattattaataattaattaattaacatcaaacacggcttctcatgctatttctacctcactttggttttggggtgttcctgataattgtgcacacctgagttcacagcttcaccacttgtccattgcgttattttctttttcctttataattctttctttttccttcataattttcaaaagaaaacccaaagctctaaggtaacaaattaccaaattacatgaagatttggtttttgtcttgcatttttttcctttatgtgacgctggaccttttctttacccaaggatttttaaaactcagatttaaaacaaggggttactttacatcctactaagaagtttaagtaagtaagtttcattctaaaatcagaggtaaatagagtgcataaataattttgttttaatctttttgtttttcttttagacacattagctctggagtgagtctgtcataatatttgaacaaaaattgagagctttattgctgcattttaagcataattaatttggacattatttcgtgttgtgttctttataaccaccaagtattaaactgtaaatcataatgtaactgaagcataaacatcacatggcatgttttgtcattgttttcaggtactgagttcttacttgagtatcataatatattgtgttttaacaccaacactgtaacatttacgaattatttttttaaacttcagttttactgcattttcacaacatatcagacttcaccaaatatatgccttactattgtattatagtactgctttactgtgtatctcaataaagcacgcagttatgttac

SEQ ID NO: 17 - protein, 3677 aa, Homo sapiens
MEDEREDVQKKTFTKWVNAQFSKFGKQHIENLFSDLQDGRRLLDLLEGLTGQKLPKEKGSTRVHALNNVNKALRVLQNNNVDLVNIGSTDIVDGNHKLTLGLIWNIILHWQVKNVMKNIMAGLQQTNSEKILLSWVRQSTRNYPQVNVINFTTSWSDGLALNALIHSHRPDLFDWNSVVCQQSATQRLEHAFNIARYQLGIEKLLDPEDVDTTYPDKKSILMYITSLFQVLPQQVSIEAIQEVEMLPRPPKVTKEEHFQLHHQMHYSQQITVSLAQGYERTSSPKPRFKSYAYTQAAYVTTSDPTRSPFPSQHLEAPEDKSFGSSLMESEVNLDRYQTALEEVLSWLLSAEDTLQAQGEISNDVEVVKDQFHTHEGYMMDLTAHQGRVGNILQLGSKLIGTGKLSEDEETEVQEQMNLLNSRWECLRVASMEKQSNLHRVLMDLQNQKLKELNDWLTKTEERTRKMEEEPLGPDLEDLKRQVQQHKVLQEDLEQEQVRVNSLTHMVVVVDESSGDHATAALEEQLKVLGDRWANICRWTEDRWVLLQDILLKWQRLTEEQCLFSAWLSEKEDAVNKIHTTGFKDQNEMLSSLQKLAVLKADLEKKKQSMGKLYSLKQDLLSTLKNKSVTQKTEAWLDNFARCWDNLVQKLEKSTAQISQAVTTTQPSLTQTTVMETVTTVTTREQILVKHAQEELPPPPPQKKRQITVDSEIRKRLDVDITELHSWITRSEAVLQSPEFAIFRKEGNFSDLKEKVNAIEREKAEKFRKLQDASRSAQALVEQMVNEGVNADSIKQASEQLNSRWIEFCQLLSERLNWLEYQNNIIAFYNQLQQLEQMTTTAENWLKIQPTTPSEPTAIKSQLKICKDEVNRLSGLQPQIERLKIQSIALKEKGQGPMFLDADFVAFTNHFKQVFSDVQAREKELQTIFDTLPPMRYQETMSAIRTWVQQSETKLSIPQLSVTDYEIMEQRLGELQALQSSLQEQQSGLYYLSTTVKEMSKKAPSEISRKYQSEFEEIEGRWKKLSSQLVEHCQKLEEQMNKLRKIQNHIQTLKKWMAEVDVFLKEEWPALGDSEILKKQLKQCRLLVSDIQTIQPSLNSVNEGGQKIKNEAEPEFASRLETELKELNTQWDHMCQQVYARKEALKGGLEKTVSLQKDLSEMHEWMTQAEEEYLERDFEYKTPDELQKAVEEMKRAKEEAQQKEAKVKLLTESVNSVIAQAPPVAQEALKKELETLTTNYQWLCTRLNGKCKTLEEVWACWHELLSYLEKANKWLNEVEFKLKTTENIPGGAEEISEVLDSLENLMRHSEDNPNQIRILAQTLTDGGVMDELINEELETFNSRWRELHEEAVRRQKLLEQSIQSAQETEKSLHLIQESLTFIDKQLAAYIADKVDAAQMPQEAQKIQSDLTSHEISLEEMKKHNQGKEAAQRVLSQIDVAQKKLQDVSMKFRLFQKPANFEQRLQESKMILDEVKMHLPALETKSVEQEVVQSQLNHCVNLYKSLSEVKSEVEMVIKTGRQIVQKKQTENPKELDERVTALKLHYNELGAKVTERKQQLEKCLKLSRKMRKEMNVLTEWLAATDMELTKRSAVEGMPSNLDSEVAWGKATQKEIEKQKVHLKSITEVGEALKTVLGKKETLVEDKLSLLNSNWIAVTSRAEEWLNLLLEYQKHMETFDQNVDHITKWIIQADTLLDESEKKKPQQKEDVLKRLKAELNDIRPKVDSTRDQAANLMANRGDHCRKLVEPQISELNHRFAAISHRIKTGKASIPLKELEQFNSDIQKLLEPLEAEIQQGVNLKEEDFNKDMNEDNEGTVKELLQRGDNLQQRITDERKREEIKIKQQLLQTKHNALKDLRSQRRKKALEISHQWYQYKRQADDLLKCLDDIEKKLASLPEPRDERKIKEIDRELQKKKEELNAVRRQAEGLSEDGAAMAVEPTQIQLSKRWREIESKFAQFRRLNFAQIHTVREETMMVMTEDMPLEISYVPSTYLTEITHVSQALLEVEQLLNAPDLCAKDFEDLFKQEESLKNIKDSLQQSSGRIDIIHSKKTAALQSATPVERVKLQEALSQLDFQWEKVNKMYKDRQGRFDRSVEKWRRFHYDIKIFNQWLTEAEQFLRKTQIPENWEHAKYKWYLKELQDGIGQRQTVVRTLNATGEEIIQQSSKTDASILQEKLGSLNLRWQEVCKQLSDRKKRLEEQKNILSEFQRDLNEFVLWLEEADNIASIPLEPGKEQQLKEKLEQVKLLVEELPLRQGILKQLNETGGPVLVSAPISPEEQDKLENKLKQTNLQWIKVSRALPEKQGEIEAQIKDLGQLEKKLEDLEEQLNHLLLWLSPIRNQLEIYNQPNQEGPFDVQETEIAVQAKQPDVEEILSKGQHLYKEKPATQPVKRKLEDLSSEWKAVNRLLQELRAKQPDLAPGLTTIGASPTQTVTLVTQPVVTKETAISKLEMPSSLMLEVPALADFNRAWTELTDWLSLLDQVIKSQRVMVGDLEDINEMIIKQKATMQDLEQRRPQLEELITAAQNLKNKTSNQEARTIITDRIERIQNQWDEVQEHLQNRRQQLNEMLKDSTQWLEAKEEAEQVLGQARAKLESWKEGPYTVDAIQKKITETKQLAKDLRQWQTNVDVANDLALKLLRDYSADDTRKVHMITENINASWRSIHKRVSEREAALEETHRLLQQFPLDLEKFLAWLTEAETTANVLQDATRKERLLEDSKGVKELMKQWQDLQGEIEAHTDVYHNLDENSQKILRSLEGSDDAVLLQRRLDNMNFKWSELRKKSLNIRSHLEASSDQWKRLHLSLQELLVWLQLKDDELSRQAPIGGDFPAVQKQNDVHRAFKRELKTKEPVIMSTLETVRIFLTEQPLEGLEKLYQEPRELPPEERAQNVTRLLRKQAEEVNTEWEKLNLHSADWQRKIDETLERLQELQEATDELDLKLRQAEVIKGSWQPVGDLLIDSLQDHLEKVKALRGEIAPLKENVSHVNDLARQLTTLGIQLSPYNLSTLEDLNTRWKLLQVAVEDRVRQLHEAHRDFGPASQHFLSTSVQGPWERAISPNKVPYYINHETQTTCWDHPKMTELYQSLADLNNVRFSAYRTAMKLRRLQKALCLDLLSLSAACDALDQHNLKQNDQPMDILQIINCLTTIYDRLEQEHNNLVNVPLCVDMCLNWLLNVYDTGRTGRIRVLSFKTGIISLCKAHLEDKYRYLFKQVASSTGFCDQRRLGLLLHDSIQIPRQLGEVASFGGSNIEPSVRSCFQFANNKPEIEAALFLDWMRLEPQSMVWLPVLHRVAAAETAKHQAKCNICKECPIIGFRYRSLKHFNYDICQSCFFSGRVAKGHKMHYPMVEYCTPTTSGEDVRDFAKVLKNKFRTKRYFAKHPRMGYLPVQTVLEGDNMETPVTLINFWPVDSAPASSPQLSHDDTHSRIEHYASRLAEMENSNGSYLNDSISPNESIDDEHLLIQHYCQSLNQDSPLSQPRSPAQILISLESEERGELERILADLEEENRNLQAEYDRLKQQHEHKGLSPLPSPPEMMPTSPQSPRDAELIAEAKLLRQHKGRLEARMQILEDHNKQLESQLHRLRQLLEQPQAEAKVNGTTVSSPSTSLQRSDSSQPMLLRVVGSQTSDSMGEEDLLSPPQDTSTGLEEVMEQLNNSFPSSRGRNTPGKPMREDTM

SEQ ID NO: 18 - DNA, 13993 bp, Homo sapiens
tcctggcatcagttactgtgttgactcactcagtgttgggatcactcactttccccctacaggactcagatctgggaggcaattaccttcggagaaaaacgaataggaaaaactgaagtgttactttttttaaagctgctgaagtttgttggtttctcattgtttttaagcctactggagcaataaagtttgaagaacttttaccaggttttttttatcgctgccttgatatacacttttcaaaatgctttggtgggaagaagtagaggactgttatgaaagagaagatgttcaaaagaaaacattcacaaaatgggtaaatgcacaattttctaagtttgggaagcagcatattgagaacctcttcagtgacctacaggatgggaggcgcctcctagacctcctcgaaggcctgacagggcaaaaactgccaaaagaaaaaggatccacaagagttcatgccctgaacaatgtcaacaaggcactgcgggttttgcagaacaataatgttgatttagtgaatattggaagtactgacatcgtagatggaaatcataaactgactcttggtttgatttggaatataatcctccactggcaggtcaaaaatgtaatgaaaaatatcatggctggattgcaacaaaccaacagtgaaaagattctcctgagctgggtccgacaatcaactcgtaattatccacaggttaatgtaatcaacttcaccaccagctggtctgatggcctggctttgaatgctctcatccatagtcataggccagacctatttgactggaatagtgtggtttgccagcagtcagccacacaacgactggaacatgcattcaacatcgccagatatcaattaggcatagagaaactactcgatcctgaagatgttgataccacctatccagataagaagtccatcttaatgtacatcacatcactcttccaagttttgcctcaacaagtgagcattgaagccatccaggaagtggaaatgttgccaaggccacctaaagtgactaaagaagaacattttcagttacatcatcaaatgcactattctcaacagatcacggtcagtctagcacagggatatgagagaacttcttcccctaagcctcgattcaagagctatgcctacacacaggctgcttatgtcaccacctctgaccctacacggagcccatttccttcacagcatttggaagctcctgaagacaagtcatttggcagttcattgatggagagtgaagtaaacctggaccgttatcaaacagctttagaagaagtattatcgtggcttctttctgctgaggacacattgcaagcacaaggagagatttctaatgatgtggaagtggtgaaagaccagtttcatactcatgaggggtacatgatggatttgacagcccatcagggccgggttggtaatattctacaattgggaagtaagctgattggaacaggaaaattatcagaagatgaagaaactgaagtacaagagcagatgaatctcctaaattcaagatgggaatgcctcagggtagctagcatggaaaaacaaagcaatttacatagagttttaatggatctccagaatcagaaactgaaagagttgaatgactggctaacaaaaacagaagaaagaacaaggaaaatggaggaagagcctcttggacctgatcttgaagacctaaaacgccaagtacaacaacataaggtgcttcaagaagatctagaacaagaacaagtcagggtcaattctctcactcacatggtggtggtagttgatgaatctagtggagatcacgcaactgctgctttggaagaacaacttaaggtattgggagatcgatgggcaaacatctgtagatggacagaagaccgctgggttcttttacaagacatccttctcaaatggcaacgtcttactgaagaacagtgcctttttagtgcatggctttcagaaaaagaagatgcagtgaacaagattcacacaactggctttaaagatcaaaatgaaatgttatcaagtcttcaaaaactggccgttttaaaagcggatctagaaaagaaaaagcaatccatgggcaaactgtattcactcaaacaagatcttctttcaacactgaagaataagtcagtgacccagaagacggaagcatggctggataactttgcccggtgttgggataatttagtccaaaaacttgaaaagagtacagcacagatttcacaggctgtcaccaccactcagccatcactaacacagacaactgtaatggaaacagtaactacggtgaccacaagggaacagatcctggtaaagcatgctcaagaggaacttccaccaccacctccccaaaagaagaggcagattactgtggattctgaaattaggaaaaggttggatgttgatataactgaacttcacagctggattactcgctcagaagctgtgttgcagagtcctgaatttgcaatctttcggaaggaaggcaacttctcagacttaaaagaaaaagtcaatgccatagagcgagaaaaagctgagaagttcagaaaactgcaagatgccagcagatcagctcaggccctggtggaacagatggtgaatgagggtgttaatgcagatagcatcaaacaagcctcagaacaactgaacagccggtggatcgaattctgccagttgctaagtgagagacttaactggctggagtatcagaacaacatcatcgctttctataatcagctacaacaattggagcagatgacaactactgctgaaaactggttgaaaatccaacccaccaccccatcagagccaacagcaattaaaagtcagttaaaaatttgtaaggatgaagtcaaccggctatcaggtcttcaacctcaaattgaacgattaaaaattcaaagcatagccctgaaagagaaaggacaaggacccatgttcctggatgcagactttgtggcctttacaaatcattttaagcaagtcttttctgatgtgcaggccagagagaaagagctacagacaatttttgacactttgccaccaatgcgctatcaggagaccatgagtgccatcaggacatgggtccagcagtcagaaaccaaactctccatacctcaacttagtgtcaccgactatgaaatcatggagcagagactcggggaattgcaggctttacaaagttctctgcaagagcaacaaagtggcctatactatctcagcaccactgtgaaagagatgtcgaagaaagcgccctctgaaattagccggaaatatcaatcagaatttgaagaaattgagggacgctggaagaagctctcctcccagctggttgagcattgtcaaaagctagaggagcaaatgaataaactccgaaaaattcagaatcacatacaaaccctgaagaaatggatggctgaagttgatgtttttctgaaggaggaatggcctgcccttggggattcagaaattctaaaaaagcagctgaaacagtgcagacttttagtcagtgatattcagacaattcagcccagtctaaacagtgtcaatgaaggtgggcagaagataaagaatgaagcagagccagagtttgcttcgagacttgagacagaactcaaagaacttaacactcagtgggatcacatgtgccaacaggtctatgccagaaaggaggccttgaagggaggtttggagaaaactgtaagcctccagaaagatctatcagagatgcacgaatggatgacacaagctgaagaagagtatcttgagagagattttgaatataaaactccagatgaattacagaaagcagttgaagagatgaagagagctaaagaagaggcccaacaaaaagaagcgaaagtgaaactccttactgagtctgtaaatagtgtcatagctcaagctccacctgtagcacaagaggccttaaaaaaggaacttgaaactctaaccaccaactaccagtggctctgcactaggctgaatgggaaatgcaagactttggaagaagtttgggcatgttggcatgagttattgtcatacttggagaaagcaaacaagtggctaaatgaagtagaatttaaacttaaaaccactgaaaacattcctggcggagctgaggaaatctctgaggtgctagattcacttgaaaatttgatgcgacattcagaggataacccaaatcagattcgcatattggcacagaccctaacagatggcggagtcatggatgagctaatcaatgaggaacttgagacatttaattctcgttggagggaactacatgaagaggctgtaaggaggcaaaagttgcttgaacagagcatccagtctgcccaggagactgaaaaatccttacacttaatccaggagtccctcacattcattgacaagcagttggcagcttatattgcagacaaggtggacgcagctcaaatgcctcaggaagcccagaaaatccaatctgatttgacaagtcatgagatcagtttagaagaaatgaagaaacataatcaggggaaggaggctgcccaaagagtcctgtctcagattgatgttgcacagaaaaaattacaagatgtctccatgaagtttcgattattccagaaaccagccaattttgagcagcgtctacaagaaagtaagatgattttagatgaagtgaagatgcacttgcctgcattggaaacaaagagtgtggaacaggaagtagtacagtcacagctaaatcattgtgtgaacttgtataaaagtctgagtgaagtgaagtctgaagtggaaatggtgataaagactggacgtcagattgtacagaaaaagcagacggaaaatcccaaagaacttgatgaaagagtaacagctttgaaattgcattataatgagctgggagcaaaggtaacagaaagaaagcaacagttggagaaatgcttgaaattgtcccgtaagatgcgaaaggaaatgaatgtcttgacagaatggctggcagctacagatatggaattgacaaagagatcagcagttgaaggaatgcctagtaatttggattctgaagttgcctggggaaaggctactcaaaaagagattgagaaacagaaggtgcacctgaagagtatcacagaggtaggagaggccttgaaaacagttttgggcaagaaggagacgttggtggaagataaactcagtcttctgaatagtaactggatagctgtcacctcccgagcagaagagtggttaaatcttttgttggaataccagaaacacatggaaacttttgaccagaatgtggaccacatcacaaagtggatcattcaggctgacacacttttggatgaatcagagaaaaagaaaccccagcaaaaagaagacgtgcttaagcgtttaaaggcagaactgaatgacatacgcccaaaggtggactctacacgtgaccaagcagcaaacttgatggcaaaccgcggtgaccactgcaggaaattagtagagccccaaatctcagagctcaaccatcgatttgcagccatttcacacagaattaagactggaaaggcctccattcctttgaaggaattggagcagtttaactcagatatacaaaaattgcttgaaccactggaggctgaaattcagcagggggtgaatctgaaagaggaagacttcaataaagatatgaatgaagacaatgagggtactgtaaaagaattgttgcaaagaggagacaacttacaacaaagaatcacagatgagagaaagcgagaggaaataaagataaaacagcagctgttacagacaaaacataatgctctcaaggatttgaggtctcaaagaagaaaaaaggctctagaaatttctcatcagtggtatcagtacaagaggcaggctgatgatctcctgaaatgcttggatgacattgaaaaaaaattagccagcctacctgagcccagagatgaaaggaaaataaaggaaattgatcgggaattgcagaagaagaaagaggagctgaatgcagtgcgtaggcaagctgagggcttgtctgaggatggggccgcaatggcagtggagccaactcagatccagctcagcaagcgctggcgggaaattgagagcaaatttgctcagtttcgaagactcaactttgcacaaattcacactgtccgtgaagaaacgatgatggtgatgactgaagacatgcctttggaaatttcttatgtgccttctacttatttgactgaaatcactcatgtctcacaagccctattagaagtggaacaacttctcaatgctcctgacctctgtgctaaggactttgaagatctctttaagcaagaggagtctctgaagaatataaaagatagtctacaacaaagctcaggtcggattgacattattcatagcaagaagacagcagcattgcaaagtgcaacgcctgtggaaagggtgaagctacaggaagctctctcccagcttgatttccaatgggaaaaagttaacaaaatgtacaaggaccgacaagggcgatttgacagatctgttgagaaatggcggcgttttcattatgatataaagatatttaatcagtggctaacagaagctgaacagtttctcagaaagacacaaattcctgagaattgggaacatgctaaatacaaatggtatcttaaggaactccaggatggcattgggcagcggcaaactgttgtcagaacattgaatgcaactggggaagaaataattcagcaatcctcaaaaacagatgccagtattctacaggaaaaattgggaagcctgaatctgcggtggcaggaggtctgcaaacagctgtcagacagaaaaaagaggctagaagaacaaaagaatatcttgtcagaatttcaaagagatttaaatgaatttgttttatggttggaggaagcagataacattgctagtatcccacttgaacctggaaaagagcagcaactaaaagaaaagcttgagcaagtcaagttactggtggaagagttgcccctgcgccagggaattctcaaacaattaaatgaaactggaggacccgtgcttgtaagtgctcccataagcccagaagagcaagataaacttgaaaataagctcaagcagacaaatctccagtggataaaggtttccagagctttacctgagaaacaaggagaaattgaagctcaaataaaagaccttgggcagcttgaaaaaaagcttgaagaccttgaagagcagttaaatcatctgctgctgtggttatctcctattaggaatcagttggaaatttataaccaaccaaaccaagaaggaccatttgacgttcaggaaactgaaatagcagttcaagctaaacaaccggatgtggaagagattttgtctaaagggcagcatttgtacaaggaaaaaccagccactcagccagtgaagaggaagttagaagatctgagctctgagtggaaggcggtaaaccgtttacttcaagagctgagggcaaagcagcctgacctagctcctggactgaccactattggagcctctcctactcagactgttactctggtgacacaacctgtggttactaaggaaactgccatctccaaactagaaatgccatcttccttgatgttggaggtacctgctctggcagatttcaaccgggcttggacagaacttaccgactggctttctctgcttgatcaagttataaaatcacagagggtgatggtgggtgaccttgaggatatcaacgagatgatcatcaagcagaaggcaacaatgcaggatttggaacagaggcgtccccagttggaagaactcattaccgctgcccaaaatttgaaaaacaagaccagcaatcaagaggctagaacaatcattacggatcgaattgaaagaattcagaatcagtgggatgaagtacaagaacaccttcagaaccggaggcaacagttgaatgaaatgttaaaggattcaacacaatggctggaagctaaggaagaagctgagcaggtcttaggacaggccagagccaagcttgagtcatggaaggagggtccctatacagtagatgcaatccaaaagaaaatcacagaaaccaagcagttggccaaagacctccgccagtggcagacaaatgtagatgtggcaaatgacttggccctgaaacttctccgggattattctgcagatgataccagaaaagtccacatgataacagagaatatcaatgcctcttggagaagcattcataaaagggtgagtgagcgagaggctgctttggaagaaactcatagattactgcaacagttccccctggacctggaaaagtttcttgcctggcttacagaagctgaaacaactgccaatgtcctacaggatgctacccgtaaggaaaggctcctagaagactccaagggagtaaaagagctgatgaaacaatggcaagacctccaaggtgaaattgaagctcacacagatgtttatcacaacctggatgaaaacagccaaaaaatcctgagatccctggaaggttccgatgatgcagtcctgttacaaagacgtttggataacatgaacttcaagtggagtgaacttcggaaaaagtctctcaacattaggtcccatttggaagccagttctgaccagtggaagcgtctgcacctttctctgcaggaacttctggtgtggctacagctgaaagatgatgaattaagccggcaggcacctattggaggcgactttccagcagttcagaagcagaacgatgtacatagggccttcaagagggaattgaaaactaaagaacctgtaatcatgagtactcttgagactgtacgaatatttctgacagagcagcctttggaaggactagagaaactctaccaggagcccagagagctgcctcctgaggagagagcccagaatgtcactcggcttctacgaaagcaggctgaggaggtcaatactgagtgggaaaaattgaacctgcactccgctgactggcagagaaaaatagatgagacccttgaaagactccaggaacttcaagaggccacggatgagctggacctcaagctgcgccaagctgaggtgatcaagggatcctggcagcccgtgggcgatctcctcattgactctctccaagatcacctcgagaaagtcaaggcacttcgaggagaaattgcgcctctgaaagagaacgtgagccacgtcaatgaccttgctcgccagcttaccactttgggcattcagctctcaccgtataacctcagcactctggaagacctgaacaccagatggaagcttctgcaggtggccgtcgaggaccgagtcaggcagctgcatgaagcccacagggactttggtccagcatctcagcactttctttccacgtctgtccagggtccctgggagagagccatctcgccaaacaaagtgccctactatatcaaccacgagactcaaacaacttgctgggaccatcccaaaatgacagagctctaccagtctttagctgacctgaataatgtcagattctcagcttataggactgccatgaaactccgaagactgcagaaggccctttgcttggatctcttgagcctgtcagctgcatgtgatgccttggaccagcacaacctcaagcaaaatgaccagcccatggatatcctgcagattattaattgtttgaccactatttatgaccgcctggagcaagagcacaacaatttggtcaacgtccctctctgcgtggatatgtgtctgaactggctgctgaatgtttatgatacgggacgaacagggaggatccgtgtcctgtcttttaaaactggcatcatttccctgtgtaaagcacatttggaagacaagtacagataccttttcaagcaagtggcaagttcaacaggattttgtgaccagcgcaggctgggcctccttctgcatgattctatccaaattccaagacagttgggtgaagttgcatcctttgggggcagtaacattgagccaagtgtccggagctgcttccaatttgctaataataagccagagatcgaagcggccctcttcctagactggatgagactggaaccccagtccatggtgtggctgcccgtcctgcacagagtggctgctgcagaaactgccaagcatcaggccaaatgtaacatctgcaaagagtgtccaatcattggattcaggtacaggagtctaaagcactttaattatgacatctgccaaagctgctttttttctggtcgagttgcaaaaggccataaaatgcactatcccatggtggaatattgcactccgactacatcaggagaagatgttcgagactttgccaaggtactaaaaaacaaatttcgaaccaaaaggtattttgcgaagcatccccgaatgggctacctgccagtgcagactgtcttagagggggacaacatggaaactcccgttactctgatcaacttctggccagtagattctgcgcctgcctcgtcccctcagctttcacacgatgatactcattcacgcattgaacattatgctagcaggctagcagaaatggaaaacagcaatggatcttatctaaatgatagcatctctcctaatgagagcatagatgatgaacatttgttaatccagcattactgccaaagtttgaaccaggactcccccctgagccagcctcgtagtcctgcccagatcttgatttccttagagagtgaggaaagaggggagctagagagaatcctagcagatcttgaggaagaaaacaggaatctgcaagcagaatatgaccgtctaaagcagcagcacgaacataaaggcctgtccccactgccgtcccctcctgaaatgatgcccacctctccccagagtccccgggatgctgagctcattgctgaggccaagctactgcgtcaacacaaaggccgcctggaagccaggatgcaaatcctggaagaccacaataaacagctggagtcacagttacacaggctaaggcagctgctggagcaaccccaggcagaggccaaagtgaatggcacaacggtgtcctctccttctacctctctacagaggtccgacagcagtcagcctatgctgctccgagtggttggcagtcaaacttcggactccatgggtgaggaagatcttctcagtcctccccaggacacaagcacagggttagaggaggtgatggagcaactcaacaactccttccctagttcaagaggaagaaatacccctggaaagccaatgagagaggacacaatgtaggaagtcttttccacatggcagatgatttgggcagagcgatggagtccttagtatcagtcatgacagatgaagaaggagcagaataaatgttttacaactcctgattcccgcatggtttttataatattcatacaacaaagaggattagacagtaagagtttacaagaaataaatctatatttttgtgaagggtagtggtattatactgtagatttcagtagtttctaagtctgttattgttttgttaacaatggcaggttttacacgtctatgcaattgtacaaaaaagttataagaaaactacatgtaaaatcttgatagctaaataacttgccatttctttatatggaacgcattttgggttgtttaaaaatttataacagttataaagaaagattgtaaactaaagtgtgctttataaaaaaaagttgtttataaaaacccctaaaaacaaaacaaacacacacacacacacatacacacacacacacaaaactttgaggcagcgcattgttttgcatccttttggcgtgatatccatatgaaattcatggctttttctttttttgcatattaaagataagacttcctctaccaccacaccaaatgactactacacactgctcatttgagaactgtcagctgagtggggcaggcttgagttttcatttcatatatctatatgtctataagtatataaatactatagttatatagataaagagatacgaatttctatagactgactttttccattttttaaatgttcatgtcacatcctaatagaaagaaattacttctagtcagtcatccaggcttacctgcttggtctagaatggatttttcccggagccggaagccaggaggaaactacaccacactaaaacattgtctacagctccagatgtttctcattttaaacaactttccactgacaacgaaagtaaagtaaagtattggatttttttaaagggaacatgtgaatgaatacacaggacttattatatcagagtgagtaatcggttggttggttgattgattgattgattgatacattcagcttcctgctgctagcaatgccacgatttagatttaatgatgcttcagtggaaatcaatcagaaggtattctgaccttgtgaacatcagaaggtattttttaactcccaagcagtagcaggacgatgatagggctggagggctatggattcccagcccatccctgtgaaggagtaggccactctttaagtgaaggattggatgattgttcataatacataaagttctctgtaattacaactaaattattatgccctcttctcacagtcaaaaggaactgggtggtttggtttttgttgcttttttagatttattgtcccatgtgggatgagtttttaaatgccacaagacataatttaaaataaataaactttgggaaaaggtgtaaaacagtagccccatcacatttgtgatactgacaggtatcaacccagaagcccatgaactgtgtttccatcctttgcatttctctgcgagtagttccacacaggtttgtaagtaagtaagaaagaaggcaaattgattcaaatgttacaaaaaaacccttcttggtggattagacaggttaaatatataaacaaacaaacaaaaattgctcaaaaaagaggagaaaagctcaagaggaaaagctaaggactggtaggaaaaagctttactctttcatgccattttatttctttttgatttttaaatcattcattcaatagataccaccgtgtgacctataattttgcaaatctgttacctctgacatcaagtgtaattagcttttggagagtgggctgacatcaagtgtaattagcttttggagagtgggttttgtccattattaataattaattaattaacatcaaacacggcttctcatgctatttctacctcactttggttttggggtgttcctgataattgtgcacacctgagttcacagcttcaccacttgtccattgcgttattttctttttcctttataattctttctttttccttcataattttcaaaagaaaacccaaagctctaaggtaacaaattaccaaattacatgaagatttggtttttgtcttgcatttttttcctttatgtgacgctggaccttttctttacccaaggatttttaaaactcagatttaaaacaaggggttactttacatcctactaagaagtttaagtaagtaagtttcattctaaaatcagaggtaaatagagtgcataaataattttgttttaatctttttgtttttcttttagacacattagctctggagtgagtctgtcataatatttgaacaaaaattgagagctttattgctgcattttaagcataattaatttggacattatttcgtgttgtgttctttataaccaccaagtattaaactgtaaatcataatgtaactgaagcataaacatcacatggcatgttttgtcattgttttcaggtactgagttcttacttgagtatcataatatattgtgttttaacaccaacactgtaacatttacgaattatttttttaaacttcagttttactgcattttcacaacatatcagacttcaccaaatatatgccttactattgtattatagtactgctttactgtgtatctcaataaagcacgcagttatgttac

SEQ ID NO: 19 - protein, 3685 aa, Homo sapiens
MLWWEEVEDCYEREDVQKKTFTKWVNAQFSKFGKQHIENLFSDLQDGRRLLDLLEGLTGQKLPKEKGSTRVHALNNVNKALRVLQNNNVDLVNIGSTDIVDGNHKLTLGLIWNIILHWQVKNVMKNIMAGLQQTNSEKILLSWVRQSTRNYPQVNVINFTTSWSDGLALNALIHSHRPDLFDWNSVVCQQSATQRLEHAFNIARYQLGIEKLLDPEDVDTTYPDKKSILMYITSLFQVLPQQVSIEAIQEVEMLPRPPKVTKEEHFQLHHQMHYSQQITVSLAQGYERTSSPKPRFKSYAYTQAAYVTTSDPTRSPFPSQHLEAPEDKSFGSSLMESEVNLDRYQTALEEVLSWLLSAEDTLQAQGEISNDVEVVKDQFHTHEGYMMDLTAHQGRVGNILQLGSKLIGTGKLSEDEETEVQEQMNLLNSRWECLRVASMEKQSNLHRVLMDLQNQKLKELNDWLTKTEERTRKMEEEPLGPDLEDLKRQVQQHKVLQEDLEQEQVRVNSLTHMVVVVDESSGDHATAALEEQLKVLGDRWANICRWTEDRWVLLQDILLKWQRLTEEQCLFSAWLSEKEDAVNKIHTTGFKDQNEMLSSLQKLAVLKADLEKKKQSMGKLYSLKQDLLSTLKNKSVTQKTEAWLDNFARCWDNLVQKLEKSTAQISQAVTTTQPSLTQTTVMETVTTVTTREQILVKHAQEELPPPPPQKKRQITVDSEIRKRLDVDITELHSWITRSEAVLQSPEFAIFRKEGNFSDLKEKVNAIEREKAEKFRKLQDASRSAQALVEQMVNEGVNADSIKQASEQLNSRWIEFCQLLSERLNWLEYQNNIIAFYNQLQQLEQMTTTAENWLKIQPTTPSEPTAIKSQLKICKDEVNRLSGLQPQIERLKIQSIALKEKGQGPMFLDADFVAFTNHFKQVFSDVQAREKELQTIFDTLPPMRYQETMSAIRTWVQQSETKLSIPQLSVTDYEIMEQRLGELQALQSSLQEQQSGLYYLSTTVKEMSKKAPSEISRKYQSEFEEIEGRWKKLSSQLVEHCQKLEEQMNKLRKIQNHIQTLKKWMAEVDVFLKEEWPALGDSEILKKQLKQCRLLVSDIQTIQPSLNSVNEGGQKIKNEAEPEFASRLETELKELNTQWDHMCQQVYARKEALKGGLEKTVSLQKDLSEMHEWMTQAEEEYLERDFEYKTPDELQKAVEEMKRAKEEAQQKEAKVKLLTESVNSVIAQAPPVAQEALKKELETLTTNYQWLCTRLNGKCKTLEEVWACWHELLSYLEKANKWLNEVEFKLKTTENIPGGAEEISEVLDSLENLMRHSEDNPNQIRILAQTLTDGGVMDELINEELETFNSRWRELHEEAVRRQKLLEQSIQSAQETEKSLHLIQESLTFIDKQLAAYIADKVDAAQMPQEAQKIQSDLTSHEISLEEMKKHNQGKEAAQRVLSQIDVAQKKLQDVSMKFRLFQKPANFEQRLQESKMILDEVKMHLPALETKSVEQEVVQSQLNHCVNLYKSLSEVKSEVEMVIKTGRQIVQKKQTENPKELDERVTALKLHYNELGAKVTERKQQLEKCLKLSRKMRKEMNVLTEWLAATDMELTKRSAVEGMPSNLDSEVAWGKATQKEIEKQKVHLKSITEVGEALKTVLGKKETLVEDKLSLLNSNWIAVTSRAEEWLNLLLEYQKHMETFDQNVDHITKWIIQADTLLDESEKKKPQQKEDVLKRLKAELNDIRPKVDSTRDQAANLMANRGDHCRKLVEPQISELNHRFAAISHRIKTGKASIPLKELEQFNSDIQKLLEPLEAEIQQGVNLKEEDFNKDMNEDNEGTVKELLQRGDNLQQRITDERKREEIKIKQQLLQTKHNALKDLRSQRRKKALEISHQWYQYKRQADDLLKCLDDIEKKLASLPEPRDERKIKEIDRELQKKKEELNAVRRQAEGLSEDGAAMAVEPTQIQLSKRWREIESKFAQFRRLNFAQIHTVREETMMVMTEDMPLEISYVPSTYLTEITHVSQALLEVEQLLNAPDLCAKDFEDLFKQEESLKNIKDSLQQSSGRIDIIHSKKTAALQSATPVERVKLQEALSQLDFQWEKVNKMYKDRQGRFDRSVEKWRRFHYDIKIFNQWLTEAEQFLRKTQIPENWEHAKYKWYLKELQDGIGQRQTVVRTLNATGEEIIQQSSKTDASILQEKLGSLNLRWQEVCKQLSDRKKRLEEQKNILSEFQRDLNEFVLWLEEADNIASIPLEPGKEQQLKEKLEQVKLLVEELPLRQGILKQLNETGGPVLVSAPISPEEQDKLENKLKQTNLQWIKVSRALPEKQGEIEAQIKDLGQLEKKLEDLEEQLNHLLLWLSPIRNQLEIYNQPNQEGPFDVQETEIAVQAKQPDVEEILSKGQHLYKEKPATQPVKRKLEDLSSEWKAVNRLLQELRAKQPDLAPGLTTIGASPTQTVTLVTQPVVTKETAISKLEMPSSLMLEVPALADFNRAWTELTDWLSLLDQVIKSQRVMVGDLEDINEMIIKQKATMQDLEQRRPQLEELITAAQNLKNKTSNQEARTIITDRIERIQNQWDEVQEHLQNRRQQLNEMLKDSTQWLEAKEEAEQVLGQARAKLESWKEGPYTVDAIQKKITETKQLAKDLRQWQTNVDVANDLALKLLRDYSADDTRKVHMITENINASWRSIHKRVSEREAALEETHRLLQQFPLDLEKFLAWLTEAETTANVLQDATRKERLLEDSKGVKELMKQWQDLQGEIEAHTDVYHNLDENSQKILRSLEGSDDAVLLQRRLDNMNFKWSELRKKSLNIRSHLEASSDQWKRLHLSLQELLVWLQLKDDELSRQAPIGGDFPAVQKQNDVHRAFKRELKTKEPVIMSTLETVRIFLTEQPLEGLEKLYQEPRELPPEERAQNVTRLLRKQAEEVNTEWEKLNLHSADWQRKIDETLERLQELQEATDELDLKLRQAEVIKGSWQPVGDLLIDSLQDHLEKVKALRGEIAPLKENVSHVNDLARQLTTLGIQLSPYNLSTLEDLNTRWKLLQVAVEDRVRQLHEAHRDFGPASQHFLSTSVQGPWERAISPNKVPYYINHETQTTCWDHPKMTELYQSLADLNNVRFSAYRTAMKLRRLQKALCLDLLSLSAACDALDQHNLKQNDQPMDILQIINCLTTIYDRLEQEHNNLVNVPLCVDMCLNWLLNVYDTGRTGRIRVLSFKTGIISLCKAHLEDKYRYLFKQVASSTGFCDQRRLGLLLHDSIQIPRQLGEVASFGGSNIEPSVRSCFQFANNKPEIEAALFLDWMRLEPQSMVWLPVLHRVAAAETAKHQAKCNICKECPIIGFRYRSLKHFNYDICQSCFFSGRVAKGHKMHYPMVEYCTPTTSGEDVRDFAKVLKNKFRTKRYFAKHPRMGYLPVQTVLEGDNMETPVTLINFWPVDSAPASSPQLSHDDTHSRIEHYASRLAEMENSNGSYLNDSISPNESIDDEHLLIQHYCQSLNQDSPLSQPRSPAQILISLESEERGELERILADLEEENRNLQAEYDRLKQQHEHKGLSPLPSPPEMMPTSPQSPRDAELIAEAKLLRQHKGRLEARMQILEDHNKQLESQLHRLRQLLEQPQAEAKVNGTTVSSPSTSLQRSDSSQPMLLRVVGSQTSDSMGEEDLLSPPQDTSTGLEEVMEQLNNSFPSSRGRNTPGKPMREDTM

SEQ ID NO: 20 - DNA, 14000 bp, Homo sapiens
atgctgtctgtgaagctgaatctgtgagaacacctcactattcacggcaaccggagtggaagaaacaggtgcaaaaagattgtgtgtttgtctgcttttgtgaggctggtcagagattctgtgcctgctttatctgtgcttggctatgactctacctccaggtttaccataccccatagaatgtgtaagagaaaagtaccaacagggaaatcagcaaaaagctttcctatgaaggtgtgtagccagcctccgcagaatttgaaatgtctgaggtctcatctgatgaaagagaagatgttcaaaagaaaacattcacaaaatgggtaaatgcacaattttctaagtttgggaagcagcatattgagaacctcttcagtgacctacaggatgggaggcgcctcctagacctcctcgaaggcctgacagggcaaaaactgccaaaagaaaaaggatccacaagagttcatgccctgaacaatgtcaacaaggcactgcgggttttgcagaacaataatgttgatttagtgaatattggaagtactgacatcgtagatggaaatcataaactgactcttggtttgatttggaatataatcctccactggcaggtcaaaaatgtaatgaaaaatatcatggctggattgcaacaaaccaacagtgaaaagattctcctgagctgggtccgacaatcaactcgtaattatccacaggttaatgtaatcaacttcaccaccagctggtctgatggcctggctttgaatgctctcatccatagtcataggccagacctatttgactggaatagtgtggtttgccagcagtcagccacacaacgactggaacatgcattcaacatcgccagatatcaattaggcatagagaaactactcgatcctgaagatgttgataccacctatccagataagaagtccatcttaatgtacatcacatcactcttccaagttttgcctcaacaagtgagcattgaagccatccaggaagtggaaatgttgccaaggccacctaaagtgactaaagaagaacattttcagttacatcatcaaatgcactattctcaacagatcacggtcagtctagcacagggatatgagagaacttcttcccctaagcctcgattcaagagctatgcctacacacaggctgcttatgtcaccacctctgaccctacacggagcccatttccttcacagcatttggaagctcctgaagacaagtcatttggcagttcattgatggagagtgaagtaaacctggaccgttatcaaacagctttagaagaagtattatcgtggcttctttctgctgaggacacattgcaagcacaaggagagatttctaatgatgtggaagtggtgaaagaccagtttcatactcatgaggggtacatgatggatttgacagcccatcagggccgggttggtaatattctacaattgggaagtaagctgattggaacaggaaaattatcagaagatgaagaaactgaagtacaagagcagatgaatctcctaaattcaagatgggaatgcctcagggtagctagcatggaaaaacaaagcaatttacatagagttttaatggatctccagaatcagaaactgaaagagttgaatgactggctaacaaaaacagaagaaagaacaaggaaaatggaggaagagcctcttggacctgatcttgaagacctaaaacgccaagtacaacaacataaggtgcttcaagaagatctagaacaagaacaagtcagggtcaattctctcactcacatggtggtggtagttgatgaatctagtggagatcacgcaactgctgctttggaagaacaacttaaggtattgggagatcgatgggcaaacatctgtagatggacagaagaccgctgggttcttttacaagacatccttctcaaatggcaacgtcttactgaagaacagtgcctttttagtgcatggctttcagaaaaagaagatgcagtgaacaagattcacacaactggctttaaagatcaaaatgaaatgttatcaagtcttcaaaaactggccgttttaaaagcggatctagaaaagaaaaagcaatccatgggcaaactgtattcactcaaacaagatcttctttcaacactgaagaataagtcagtgacccagaagacggaagcatggctggataactttgcccggtgttgggataatttagtccaaaaacttgaaaagagtacagcacagatttcacaggctgtcaccaccactcagccatcactaacacagacaactgtaatggaaacagtaactacggtgaccacaagggaacagatcctggtaaagcatgctcaagaggaacttccaccaccacctccccaaaagaagaggcagattactgtggattctgaaattaggaaaaggttggatgttgatataactgaacttcacagctggattactcgctcagaagctgtgttgcagagtcctgaatttgcaatctttcggaaggaaggcaacttctcagacttaaaagaaaaagtcaatgccatagagcgagaaaaagctgagaagttcagaaaactgcaagatgccagcagatcagctcaggccctggtggaacagatggtgaatgagggtgttaatgcagatagcatcaaacaagcctcagaacaactgaacagccggtggatcgaattctgccagttgctaagtgagagacttaactggctggagtatcagaacaacatcatcgctttctataatcagctacaacaattggagcagatgacaactactgctgaaaactggttgaaaatccaacccaccaccccatcagagccaacagcaattaaaagtcagttaaaaatttgtaaggatgaagtcaaccggctatcaggtcttcaacctcaaattgaacgattaaaaattcaaagcatagccctgaaagagaaaggacaaggacccatgttcctggatgcagactttgtggcctttacaaatcattttaagcaagtcttttctgatgtgcaggccagagagaaagagctacagacaatttttgacactttgccaccaatgcgctatcaggagaccatgagtgccatcaggacatgggtccagcagtcagaaaccaaactctccatacctcaacttagtgtcaccgactatgaaatcatggagcagagactcggggaattgcaggctttacaaagttctctgcaagagcaacaaagtggcctatactatctcagcaccactgtgaaagagatgtcgaagaaagcgccctctgaaattagccggaaatatcaatcagaatttgaagaaattgagggacgctggaagaagctctcctcccagctggttgagcattgtcaaaagctagaggagcaaatgaataaactccgaaaaattcagaatcacatacaaaccctgaagaaatggatggctgaagttgatgtttttctgaaggaggaatggcctgcccttggggattcagaaattctaaaaaagcagctgaaacagtgcagacttttagtcagtgatattcagacaattcagcccagtctaaacagtgtcaatgaaggtgggcagaagataaagaatgaagcagagccagagtttgcttcgagacttgagacagaactcaaagaacttaacactcagtgggatcacatgtgccaacaggtctatgccagaaaggaggccttgaagggaggtttggagaaaactgtaagcctccagaaagatctatcagagatgcacgaatggatgacacaagctgaagaagagtatcttgagagagattttgaatataaaactccagatgaattacagaaagcagttgaagagatgaagagagctaaagaagaggcccaacaaaaagaagcgaaagtgaaactccttactgagtctgtaaatagtgtcatagctcaagctccacctgtagcacaagaggccttaaaaaaggaacttgaaactctaaccaccaactaccagtggctctgcactaggctgaatgggaaatgcaagactttggaagaagtttgggcatgttggcatgagttattgtcatacttggagaaagcaaacaagtggctaaatgaagtagaatttaaacttaaaaccactgaaaacattcctggcggagctgaggaaatctctgaggtgctagattcacttgaaaatttgatgcgacattcagaggataacccaaatcagattcgcatattggcacagaccctaacagatggcggagtcatggatgagctaatcaatgaggaacttgagacatttaattctcgttggagggaactacatgaagaggctgtaaggaggcaaaagttgcttgaacagagcatccagtctgcccaggagactgaaaaatccttacacttaatccaggagtccctcacattcattgacaagcagttggcagcttatattgcagacaaggtggacgcagctcaaatgcctcaggaagcccagaaaatccaatctgatttgacaagtcatgagatcagtttagaagaaatgaagaaacataatcaggggaaggaggctgcccaaagagtcctgtctcagattgatgttgcacagaaaaaattacaagatgtctccatgaagtttcgattattccagaaaccagccaattttgagcagcgtctacaagaaagtaagatgattttagatgaagtgaagatgcacttgcctgcattggaaacaaagagtgtggaacaggaagtagtacagtcacagctaaatcattgtgtgaacttgtataaaagtctgagtgaagtgaagtctgaagtggaaatggtgataaagactggacgtcagattgtacagaaaaagcagacggaaaatcccaaagaacttgatgaaagagtaacagctttgaaattgcattataatgagctgggagcaaaggtaacagaaagaaagcaacagttggagaaatgcttgaaattgtcccgtaagatgcgaaaggaaatgaatgtcttgacagaatggctggcagctacagatatggaattgacaaagagatcagcagttgaaggaatgcctagtaatttggattctgaagttgcctggggaaaggctactcaaaaagagattgagaaacagaaggtgcacctgaagagtatcacagaggtaggagaggccttgaaaacagttttgggcaagaaggagacgttggtggaagataaactcagtcttctgaatagtaactggatagctgtcacctcccgagcagaagagtggttaaatcttttgttggaataccagaaacacatggaaacttttgaccagaatgtggaccacatcacaaagtggatcattcaggctgacacacttttggatgaatcagagaaaaagaaaccccagcaaaaagaagacgtgcttaagcgtttaaaggcagaactgaatgacatacgcccaaaggtggactctacacgtgaccaagcagcaaacttgatggcaaaccgcggtgaccactgcaggaaattagtagagccccaaatctcagagctcaaccatcgatttgcagccatttcacacagaattaagactggaaaggcctccattcctttgaaggaattggagcagtttaactcagatatacaaaaattgcttgaaccactggaggctgaaattcagcagggggtgaatctgaaagaggaagacttcaataaagatatgaatgaagacaatgagggtactgtaaaagaattgttgcaaagaggagacaacttacaacaaagaatcacagatgagagaaagcgagaggaaataaagataaaacagcagctgttacagacaaaacataatgctctcaaggatttgaggtctcaaagaagaaaaaaggctctagaaatttctcatcagtggtatcagtacaagaggcaggctgatgatctcctgaaatgcttggatgacattgaaaaaaaattagccagcctacctgagcccagagatgaaaggaaaataaaggaaattgatcgggaattgcagaagaagaaagaggagctgaatgcagtgcgtaggcaagctgagggcttgtctgaggatggggccgcaatggcagtggagccaactcagatccagctcagcaagcgctggcgggaaattgagagcaaatttgctcagtttcgaagactcaactttgcacaaattcacactgtccgtgaagaaacgatgatggtgatgactgaagacatgcctttggaaatttcttatgtgccttctacttatttgactgaaatcactcatgtctcacaagccctattagaagtggaacaacttctcaatgctcctgacctctgtgctaaggactttgaagatctctttaagcaagaggagtctctgaagaatataaaagatagtctacaacaaagctcaggtcggattgacattattcatagcaagaagacagcagcattgcaaagtgcaacgcctgtggaaagggtgaagctacaggaagctctctcccagcttgatttccaatgggaaaaagttaacaaaatgtacaaggaccgacaagggcgatttgacagatctgttgagaaatggcggcgttttcattatgatataaagatatttaatcagtggctaacagaagctgaacagtttctcagaaagacacaaattcctgagaattgggaacatgctaaatacaaatggtatcttaaggaactccaggatggcattgggcagcggcaaactgttgtcagaacattgaatgcaactggggaagaaataattcagcaatcctcaaaaacagatgccagtattctacaggaaaaattgggaagcctgaatctgcggtggcaggaggtctgcaaacagctgtcagacagaaaaaagaggctagaagaacaaaagaatatcttgtcagaatttcaaagagatttaaatgaatttgttttatggttggaggaagcagataacattgctagtatcccacttgaacctggaaaagagcagcaactaaaagaaaagcttgagcaagtcaagttactggtggaagagttgcccctgcgccagggaattctcaaacaattaaatgaaactggaggacccgtgcttgtaagtgctcccataagcccagaagagcaagataaacttgaaaataagctcaagcagacaaatctccagtggataaaggtttccagagctttacctgagaaacaaggagaaattgaagctcaaataaaagaccttgggcagcttgaaaaaaagcttgaagaccttgaagagcagttaaatcatctgctgctgtggttatctcctattaggaatcagttggaaatttataaccaaccaaaccaagaaggaccatttgacgttcaggaaactgaaatagcagttcaagctaaacaaccggatgtggaagagattttgtctaaagggcagcatttgtacaaggaaaaaccagccactcagccagtgaagaggaagttagaagatctgagctctgagtggaaggcggtaaaccgtttacttcaagagctgagggcaaagcagcctgacctagctcctggactgaccactattggagcctctcctactcagactgttactctggtgacacaacctgtggttactaaggaaactgccatctccaaactagaaatgccatcttccttgatgttggaggtacctgctctggcagatttcaaccgggcttggacagaacttaccgactggctttctctgcttgatcaagttataaaatcacagagggtgatggtgggtgaccttgaggatatcaacgagatgatcatcaagcagaaggcaacaatgcaggatttggaacagaggcgtccccagttggaagaactcattaccgctgcccaaaatttgaaaaacaagaccagcaatcaagaggctagaacaatcattacggatcgaattgaaagaattcagaatcagtgggatgaagtacaagaacaccttcagaaccggaggcaacagttgaatgaaatgttaaaggattcaacacaatggctggaagctaaggaagaagctgagcaggtcttaggacaggccagagccaagcttgagtcatggaaggagggtccctatacagtagatgcaatccaaaagaaaatcacagaaaccaagcagttggccaaagacctccgccagtggcagacaaatgtagatgtggcaaatgacttggccctgaaacttctccgggattattctgcagatgataccagaaaagtccacatgataacagagaatatcaatgcctcttggagaagcattcataaaagggtgagtgagcgagaggctgctttggaagaaactcatagattactgcaacagttccccctggacctggaaaagtttcttgcctggcttacagaagctgaaacaactgccaatgtcctacaggatgctacccgtaaggaaaggctcctagaagactccaagggagtaaaagagctgatgaaacaatggcaagacctccaaggtgaaattgaagctcacacagatgtttatcacaacctggatgaaaacagccaaaaaatcctgagatccctggaaggttccgatgatgcagtcctgttacaaagacgtttggataacatgaacttcaagtggagtgaacttcggaaaaagtctctcaacattaggtcccatttggaagccagttctgaccagtggaagcgtctgcacctttctctgcaggaacttctggtgtggctacagctgaaagatgatgaattaagccggcaggcacctattggaggcgactttccagcagttcagaagcagaacgatgtacatagggccttcaagagggaattgaaaactaaagaacctgtaatcatgagtactcttgagactgtacgaatatttctgacagagcagcctttggaaggactagagaaactctaccaggagcccagagagctgcctcctgaggagagagcccagaatgtcactcggcttctacgaaagcaggctgaggaggtcaatactgagtgggaaaaattgaacctgcactccgctgactggcagagaaaaatagatgagacccttgaaagactccaggaacttcaagaggccacggatgagctggacctcaagctgcgccaagctgaggtgatcaagggatcctggcagcccgtgggcgatctcctcattgactctctccaagatcacctcgagaaagtcaaggcacttcgaggagaaattgcgcctctgaaagagaacgtgagccacgtcaatgaccttgctcgccagcttaccactttgggcattcagctctcaccgtataacctcagcactctggaagacctgaacaccagatggaagcttctgcaggtggccgtcgaggaccgagtcaggcagctgcatgaagcccacagggactttggtccagcatctcagcactttctttccacgtctgtccagggtccctgggagagagccatctcgccaaacaaagtgccctactatatcaaccacgagactcaaacaacttgctgggaccatcccaaaatgacagagctctaccagtctttagctgacctgaataatgtcagattctcagcttataggactgccatgaaactccgaagactgcagaaggccctttgcttggatctcttgagcctgtcagctgcatgtgatgccttggaccagcacaacctcaagcaaaatgaccagcccatggatatcctgcagattattaattgtttgaccactatttatgaccgcctggagcaagagcacaacaatttggtcaacgtccctctctgcgtggatatgtgtctgaactggctgctgaatgtttatgatacgggacgaacagggaggatccgtgtcctgtcttttaaaactggcatcatttccctgtgtaaagcacatttggaagacaagtacagataccttttcaagcaagtggcaagttcaacaggattttgtgaccagcgcaggctgggcctccttctgcatgattctatccaaattccaagacagttgggtgaagttgcatcctttgggggcagtaacattgagccaagtgtccggagctgcttccaatttgctaataataagccagagatcgaagcggccctcttcctagactggatgagactggaaccccagtccatggtgtggctgcccgtcctgcacagagtggctgctgcagaaactgccaagcatcaggccaaatgtaacatctgcaaagagtgtccaatcattggattcaggtacaggagtctaaagcactttaattatgacatctgccaaagctgctttttttctggtcgagttgcaaaaggccataaaatgcactatcccatggtggaatattgcactccgactacatcaggagaagatgttcgagactttgccaaggtactaaaaaacaaatttcgaaccaaaaggtattttgcgaagcatccccgaatgggctacctgccagtgcagactgtcttagagggggacaacatggaaactcccgttactctgatcaacttctggccagtagattctgcgcctgcctcgtcccctcagctttcacacgatgatactcattcacgcattgaacattatgctagcaggctagcagaaatggaaaacagcaatggatcttatctaaatgatagcatctctcctaatgagagcatagatgatgaacatttgttaatccagcattactgccaaagtttgaaccaggactcccccctgagccagcctcgtagtcctgcccagatcttgatttccttagagagtgaggaaagaggggagctagagagaatcctagcagatcttgaggaagaaaacaggaatctgcaagcagaatatgaccgtctaaagcagcagcacgaacataaaggcctgtccccactgccgtcccctcctgaaatgatgcccacctctccccagagtccccgggatgctgagctcattgctgaggccaagctactgcgtcaacacaaaggccgcctggaagccaggatgcaaatcctggaagaccacaataaacagctggagtcacagttacacaggctaaggcagctgctggagcaaccccaggcagaggccaaagtgaatggcacaacggtgtcctctccttctacctctctacagaggtccgacagcagtcagcctatgctgctccgagtggttggcagtcaaacttcggactccatgggtgaggaagatcttctcagtcctccccaggacacaagcacagggttagaggaggtgatggagcaactcaacaactccttccctagttcaagaggaagaaatacccctggaaagccaatgagagaggacacaatgtaggaagtcttttccacatggcagatgatttgggcagagcgatggagtccttagtatcagtcatgacagatgaagaaggagcagaataaatgttttacaactcctgattcccgcatggtttttataatattcatacaacaaagaggattagacagtaagagtttacaagaaataaatctatatttttgtgaagggtagtggtattatactgtagatttcagtagtttctaagtctgttattgttttgttaacaatggcaggttttacacgtctatgcaattgtacaaaaaagttataagaaaactacatgtaaaatcttgatagctaaataacttgccatttctttatatggaacgcattttgggttgtttaaaaatttataacagttataaagaaagattgtaaactaaagtgtgctttataaaaaaaagttgtttataaaaacccctaaaaacaaaacaaacacacacacacacacatacacacacacacacaaaactttgaggcagcgcattgttttgcatccttttggcgtgatatccatatgaaattcatggctttttctttttttgcatattaaagataagacttcctctaccaccacaccaaatgactactacacactgctcatttgagaactgtcagctgagtggggcaggcttgagttttcatttcatatatctatatgtctataagtatataaatactatagttatatagataaagagatacgaatttctatagactgactttttccattttttaaatgttcatgtcacatcctaatagaaagaaattacttctagtcagtcatccaggcttacctgcttggtctagaatggatttttcccggagccggaagccaggaggaaactacaccacactaaaacattgtctacagctccagatgtttctcattttaaacaactttccactgacaacgaaagtaaagtaaagtattggatttttttaaagggaacatgtgaatgaatacacaggacttattatatcagagtgagtaatcggttggttggttgattgattgattgattgatacattcagcttcctgctgctagcaatgccacgatttagatttaatgatgcttcagtggaaatcaatcagaaggtattctgaccttgtgaacatcagaaggtattttttaactcccaagcagtagcaggacgatgatagggctggagggctatggattcccagcccatccctgtgaaggagtaggccactctttaagtgaaggattggatgattgttcataatacataaagttctctgtaattacaactaaattattatgccctcttctcacagtcaaaaggaactgggtggtttggtttttgttgcttttttagatttattgtcccatgtgggatgagtttttaaatgccacaagacataatttaaaataaataaactttgggaaaaggtgtaaaacagtagccccatcacatttgtgatactgacaggtatcaacccagaagcccatgaactgtgtttccatcctttgcatttctctgcgagtagttccacacaggtttgtaagtaagtaagaaagaaggcaaattgattcaaatgttacaaaaaaacccttcttggtggattagacaggttaaatatataaacaaacaaacaaaaattgctcaaaaaagaggagaaaagctcaagaggaaaagctaaggactggtaggaaaaagctttactctttcatgccattttatttctttttgatttttaaatcattcattcaatagataccaccgtgtgacctataattttgcaaatctgttacctctgacatcaagtgtaattagcttttggagagtgggctgacatcaagtgtaattagcttttggagagtgggttttgtccattattaataattaattaattaacatcaaacacggcttctcatgctatttctacctcactttggttttggggtgttcctgataattgtgcacacctgagttcacagcttcaccacttgtccattgcgttattttctttttcctttataattctttctttttccttcataattttcaaaagaaaacccaaagctctaaggtaacaaattaccaaattacatgaagatttggtttttgtcttgcatttttttcctttatgtgacgctggaccttttctttacccaaggatttttaaaactcagatttaaaacaaggggttactttacatcctactaagaagtttaagtaagtaagtttcattctaaaatcagaggtaaatagagtgcataaataattttgttttaatctttttgtttttcttttagacacattagctctggagtgagtctgtcataatatttgaacaaaaattgagagctttattgctgcattttaagcataattaatttggacattatttcgtgttgtgttctttataaccaccaagtattaaactgtaaatcataatgtaactgaagcataaacatcacatggcatgttttgtcattgttttcaggtactgagttcttacttgagtatcataatatattgtgttttaacaccaacactgtaacatttacgaattatttttttaaacttcagttttactgcattttcacaacatatcagacttcaccaaatatatgccttactattgtattatagtactgctttactgtgtatctcaataaagcacgcagttatgttac

SEQ ID NO: 21 - protein, 3681 aa, Homo sapiens
MSEVSSDEREDVQKKTFTKWVNAQFSKFGKQHIENLFSDLQDGRRLLDLLEGLTGQKLPKEKGSTRVHALNNVNKALRVLQNNNVDLVNIGSTDIVDGNHKLTLGLIWNIILHWQVKNVMKNIMAGLQQTNSEKILLSWVRQSTRNYPQVNVINFTTSWSDGLALNALIHSHRPDLFDWNSVVCQQSATQRLEHAFNIARYQLGIEKLLDPEDVDTTYPDKKSILMYITSLFQVLPQQVSIEAIQEVEMLPRPPKVTKEEHFQLHHQMHYSQQITVSLAQGYERTSSPKPRFKSYAYTQAAYVTTSDPTRSPFPSQHLEAPEDKSFGSSLMESEVNLDRYQTALEEVLSWLLSAEDTLQAQGEISNDVEVVKDQFHTHEGYMMDLTAHQGRVGNILQLGSKLIGTGKLSEDEETEVQEQMNLLNSRWECLRVASMEKQSNLHRVLMDLQNQKLKELNDWLTKTEERTRKMEEEPLGPDLEDLKRQVQQHKVLQEDLEQEQVRVNSLTHMVVVVDESSGDHATAALEEQLKVLGDRWANICRWTEDRWVLLQDILLKWQRLTEEQCLFSAWLSEKEDAVNKIHTTGFKDQNEMLSSLQKLAVLKADLEKKKQSMGKLYSLKQDLLSTLKNKSVTQKTEAWLDNFARCWDNLVQKLEKSTAQISQAVTTTQPSLTQTTVMETVTTVTTREQILVKHAQEELPPPPPQKKRQITVDSEIRKRLDVDITELHSWITRSEAVLQSPEFAIFRKEGNFSDLKEKVNAIEREKAEKFRKLQDASRSAQALVEQMVNEGVNADSIKQASEQLNSRWIEFCQLLSERLNWLEYQNNIIAFYNQLQQLEQMTTTAENWLKIQPTTPSEPTAIKSQLKICKDEVNRLSGLQPQIERLKIQSIALKEKGQGPMFLDADFVAFTNHFKQVFSDVQAREKELQTIFDTLPPMRYQETMSAIRTWVQQSETKLSIPQLSVTDYEIMEQRLGELQALQSSLQEQQSGLYYLSTTVKEMSKKAPSEISRKYQSEFEEIEGRWKKLSSQLVEHCQKLEEQMNKLRKIQNHIQTLKKWMAEVDVFLKEEWPALGDSEILKKQLKQCRLLVSDIQTIQPSLNSVNEGGQKIKNEAEPEFASRLETELKELNTQWDHMCQQVYARKEALKGGLEKTVSLQKDLSEMHEWMTQAEEEYLERDFEYKTPDELQKAVEEMKRAKEEAQQKEAKVKLLTESVNSVIAQAPPVAQEALKKELETLTTNYQWLCTRLNGKCKTLEEVWACWHELLSYLEKANKWLNEVEFKLKTTENIPGGAEEISEVLDSLENLMRHSEDNPNQIRILAQTLTDGGVMDELINEELETFNSRWRELHEEAVRRQKLLEQSIQSAQETEKSLHLIQESLTFIDKQLAAYIADKVDAAQMPQEAQKIQSDLTSHEISLEEMKKHNQGKEAAQRVLSQIDVAQKKLQDVSMKFRLFQKPANFEQRLQESKMILDEVKMHLPALETKSVEQEVVQSQLNHCVNLYKSLSEVKSEVEMVIKTGRQIVQKKQTENPKELDERVTALKLHYNELGAKVTERKQQLEKCLKLSRKMRKEMNVLTEWLAATDMELTKRSAVEGMPSNLDSEVAWGKATQKEIEKQKVHLKSITEVGEALKTVLGKKETLVEDKLSLLNSNWIAVTSRAEEWLNLLLEYQKHMETFDQNVDHITKWIIQADTLLDESEKKKPQQKEDVLKRLKAELNDIRPKVDSTRDQAANLMANRGDHCRKLVEPQISELNHRFAAISHRIKTGKASIPLKELEQFNSDIQKLLEPLEAEIQQGVNLKEEDFNKDMNEDNEGTVKELLQRGDNLQQRITDERKREEIKIKQQLLQTKHNALKDLRSQRRKKALEISHQWYQYKRQADDLLKCLDDIEKKLASLPEPRDERKIKEIDRELQKKKEELNAVRRQAEGLSEDGAAMAVEPTQIQLSKRWREIESKFAQFRRLNFAQIHTVREETMMVMTEDMPLEISYVPSTYLTEITHVSQALLEVEQLLNAPDLCAKDFEDLFKQEESLKNIKDSLQQSSGRIDIIHSKKTAALQSATPVERVKLQEALSQLDFQWEKVNKMYKDRQGRFDRSVEKWRRFHYDIKIFNQWLTEAEQFLRKTQIPENWEHAKYKWYLKELQDGIGQRQTVVRTLNATGEEIIQQSSKTDASILQEKLGSLNLRWQEVCKQLSDRKKRLEEQKNILSEFQRDLNEFVLWLEEADNIASIPLEPGKEQQLKEKLEQVKLLVEELPLRQGILKQLNETGGPVLVSAPISPEEQDKLENKLKQTNLQWIKVSRALPEKQGEIEAQIKDLGQLEKKLEDLEEQLNHLLLWLSPIRNQLEIYNQPNQEGPFDVQETEIAVQAKQPDVEEILSKGQHLYKEKPATQPVKRKLEDLSSEWKAVNRLLQELRAKQPDLAPGLTTIGASPTQTVTLVTQPVVTKETAISKLEMPSSLMLEVPALADFNRAWTELTDWLSLLDQVIKSQRVMVGDLEDINEMIIKQKATMQDLEQRRPQLEELITAAQNLKNKTSNQEARTIITDRIERIQNQWDEVQEHLQNRRQQLNEMLKDSTQWLEAKEEAEQVLGQARAKLESWKEGPYTVDAIQKKITETKQLAKDLRQWQTNVDVANDLALKLLRDYSADDTRKVHMITENINASWRSIHKRVSEREAALEETHRLLQQFPLDLEKFLAWLTEAETTANVLQDATRKERLLEDSKGVKELMKQWQDLQGEIEAHTDVYHNLDENSQKILRSLEGSDDAVLLQRRLDNMNFKWSELRKKSLNIRSHLEASSDQWKRLHLSLQELLVWLQLKDDELSRQAPIGGDFPAVQKQNDVHRAFKRELKTKEPVIMSTLETVRIFLTEQPLEGLEKLYQEPRELPPEERAQNVTRLLRKQAEEVNTEWEKLNLHSADWQRKIDETLERLQELQEATDELDLKLRQAEVIKGSWQPVGDLLIDSLQDHLEKVKALRGEIAPLKENVSHVNDLARQLTTLGIQLSPYNLSTLEDLNTRWKLLQVAVEDRVRQLHEAHRDFGPASQHFLSTSVQGPWERAISPNKVPYYINHETQTTCWDHPKMTELYQSLADLNNVRFSAYRTAMKLRRLQKALCLDLLSLSAACDALDQHNLKQNDQPMDILQIINCLTTIYDRLEQEHNNLVNVPLCVDMCLNWLLNVYDTGRTGRIRVLSFKTGIISLCKAHLEDKYRYLFKQVASSTGFCDQRRLGLLLHDSIQIPRQLGEVASFGGSNIEPSVRSCFQFANNKPEIEAALFLDWMRLEPQSMVWLPVLHRVAAAETAKHQAKCNICKECPIIGFRYRSLKHFNYDICQSCFFSGRVAKGHKMHYPMVEYCTPTTSGEDVRDFAKVLKNKFRTKRYFAKHPRMGYLPVQTVLEGDNMETPVTLINFWPVDSAPASSPQLSHDDTHSRIEHYASRLAEMENSNGSYLNDSISPNESIDDEHLLIQHYCQSLNQDSPLSQPRSPAQILISLESEERGELERILADLEEENRNLQAEYDRLKQQHEHKGLSPLPSPPEMMPTSPQSPRDAELIAEAKLLRQHKGRLEARMQILEDHNKQLESQLHRLRQLLEQPQAEAKVNGTTVSSPSTSLQRSDSSQPMLLRVVGSQTSDSMGEEDLLSPPQDTSTGLEEVMEQLNNSFPSSRGRNTPGKPMREDTM

SEQ ID NO: 22 - DNA, 9771 bp, Homo sapiens
taatgagatcaggaggaacattcgacctgagaaagacagattgcaatgactgagatgattttgctaattttttttccagcctatttccttaatgctgtaaggaggcaaaagttgcttgaacagagcatccagtctgcccaggagactgaaaaatccttacacttaatccaggagtccctcacattcattgacaagcagttggcagcttatattgcagacaaggtggacgcagctcaaatgcctcaggaagcccagaaaatccaatctgatttgacaagtcatgagatcagtttagaagaaatgaagaaacataatcaggggaaggaggctgcccaaagagtcctgtctcagattgatgttgcacagaaaaaattacaagatgtctccatgaagtttcgattattccagaaaccagccaattttgagcagcgtctacaagaaagtaagatgattttagatgaagtgaagatgcacttgcctgcattggaaacaaagagtgtggaacaggaagtagtacagtcacagctaaatcattgtgtgaacttgtataaaagtctgagtgaagtgaagtctgaagtggaaatggtgataaagactggacgtcagattgtacagaaaaagcagacggaaaatcccaaagaacttgatgaaagagtaacagctttgaaattgcattataatgagctgggagcaaaggtaacagaaagaaagcaacagttggagaaatgcttgaaattgtcccgtaagatgcgaaaggaaatgaatgtcttgacagaatggctggcagctacagatatggaattgacaaagagatcagcagttgaaggaatgcctagtaatttggattctgaagttgcctggggaaaggctactcaaaaagagattgagaaacagaaggtgcacctgaagagtatcacagaggtaggagaggccttgaaaacagttttgggcaagaaggagacgttggtggaagataaactcagtcttctgaatagtaactggatagctgtcacctcccgagcagaagagtggttaaatcttttgttggaataccagaaacacatggaaacttttgaccagaatgtggaccacatcacaaagtggatcattcaggctgacacacttttggatgaatcagagaaaaagaaaccccagcaaaaagaagacgtgcttaagcgtttaaaggcagaactgaatgacatacgcccaaaggtggactctacacgtgaccaagcagcaaacttgatggcaaaccgcggtgaccactgcaggaaattagtagagccccaaatctcagagctcaaccatcgatttgcagccatttcacacagaattaagactggaaaggcctccattcctttgaaggaattggagcagtttaactcagatatacaaaaattgcttgaaccactggaggctgaaattcagcagggggtgaatctgaaagaggaagacttcaataaagatatgaatgaagacaatgagggtactgtaaaagaattgttgcaaagaggagacaacttacaacaaagaatcacagatgagagaaagcgagaggaaataaagataaaacagcagctgttacagacaaaacataatgctctcaaggatttgaggtctcaaagaagaaaaaaggctctagaaatttctcatcagtggtatcagtacaagaggcaggctgatgatctcctgaaatgcttggatgacattgaaaaaaaattagccagcctacctgagcccagagatgaaaggaaaataaaggaaattgatcgggaattgcagaagaagaaagaggagctgaatgcagtgcgtaggcaagctgagggcttgtctgaggatggggccgcaatggcagtggagccaactcagatccagctcagcaagcgctggcgggaaattgagagcaaatttgctcagtttcgaagactcaactttgcacaaattcacactgtccgtgaagaaacgatgatggtgatgactgaagacatgcctttggaaatttcttatgtgccttctacttatttgactgaaatcactcatgtctcacaagccctattagaagtggaacaacttctcaatgctcctgacctctgtgctaaggactttgaagatctctttaagcaagaggagtctctgaagaatataaaagatagtctacaacaaagctcaggtcggattgacattattcatagcaagaagacagcagcattgcaaagtgcaacgcctgtggaaagggtgaagctacaggaagctctctcccagcttgatttccaatgggaaaaagttaacaaaatgtacaaggaccgacaagggcgatttgacagatctgttgagaaatggcggcgttttcattatgatataaagatatttaatcagtggctaacagaagctgaacagtttctcagaaagacacaaattcctgagaattgggaacatgctaaatacaaatggtatcttaaggaactccaggatggcattgggcagcggcaaactgttgtcagaacattgaatgcaactggggaagaaataattcagcaatcctcaaaaacagatgccagtattctacaggaaaaattgggaagcctgaatctgcggtggcaggaggtctgcaaacagctgtcagacagaaaaaagaggctagaagaacaaaagaatatcttgtcagaatttcaaagagatttaaatgaatttgttttatggttggaggaagcagataacattgctagtatcccacttgaacctggaaaagagcagcaactaaaagaaaagcttgagcaagtcaagttactggtggaagagttgcccctgcgccagggaattctcaaacaattaaatgaaactggaggacccgtgcttgtaagtgctcccataagcccagaagagcaagataaacttgaaaataagctcaagcagacaaatctccagtggataaaggtttccagagctttacctgagaaacaaggagaaattgaagctcaaataaaagaccttgggcagcttgaaaaaaagcttgaagaccttgaagagcagttaaatcatctgctgctgtggttatctcctattaggaatcagttggaaatttataaccaaccaaaccaagaaggaccatttgacgttcaggaaactgaaatagcagttcaagctaaacaaccggatgtggaagagattttgtctaaagggcagcatttgtacaaggaaaaaccagccactcagccagtgaagaggaagttagaagatctgagctctgagtggaaggcggtaaaccgtttacttcaagagctgagggcaaagcagcctgacctagctcctggactgaccactattggagcctctcctactcagactgttactctggtgacacaacctgtggttactaaggaaactgccatctccaaactagaaatgccatcttccttgatgttggaggtacctgctctggcagatttcaaccgggcttggacagaacttaccgactggctttctctgcttgatcaagttataaaatcacagagggtgatggtgggtgaccttgaggatatcaacgagatgatcatcaagcagaaggcaacaatgcaggatttggaacagaggcgtccccagttggaagaactcattaccgctgcccaaaatttgaaaaacaagaccagcaatcaagaggctagaacaatcattacggatcgaattgaaagaattcagaatcagtgggatgaagtacaagaacaccttcagaaccggaggcaacagttgaatgaaatgttaaaggattcaacacaatggctggaagctaaggaagaagctgagcaggtcttaggacaggccagagccaagcttgagtcatggaaggagggtccctatacagtagatgcaatccaaaagaaaatcacagaaaccaagcagttggccaaagacctccgccagtggcagacaaatgtagatgtggcaaatgacttggccctgaaacttctccgggattattctgcagatgataccagaaaagtccacatgataacagagaatatcaatgcctcttggagaagcattcataaaagggtgagtgagcgagaggctgctttggaagaaactcatagattactgcaacagttccccctggacctggaaaagtttcttgcctggcttacagaagctgaaacaactgccaatgtcctacaggatgctacccgtaaggaaaggctcctagaagactccaagggagtaaaagagctgatgaaacaatggcaagacctccaaggtgaaattgaagctcacacagatgtttatcacaacctggatgaaaacagccaaaaaatcctgagatccctggaaggttccgatgatgcagtcctgttacaaagacgtttggataacatgaacttcaagtggagtgaacttcggaaaaagtctctcaacattaggtcccatttggaagccagttctgaccagtggaagcgtctgcacctttctctgcaggaacttctggtgtggctacagctgaaagatgatgaattaagccggcaggcacctattggaggcgactttccagcagttcagaagcagaacgatgtacatagggccttcaagagggaattgaaaactaaagaacctgtaatcatgagtactcttgagactgtacgaatatttctgacagagcagcctttggaaggactagagaaactctaccaggagcccagagagctgcctcctgaggagagagcccagaatgtcactcggcttctacgaaagcaggctgaggaggtcaatactgagtgggaaaaattgaacctgcactccgctgactggcagagaaaaatagatgagacccttgaaagactccaggaacttcaagaggccacggatgagctggacctcaagctgcgccaagctgaggtgatcaagggatcctggcagcccgtgggcgatctcctcattgactctctccaagatcacctcgagaaagtcaaggcacttcgaggagaaattgcgcctctgaaagagaacgtgagccacgtcaatgaccttgctcgccagcttaccactttgggcattcagctctcaccgtataacctcagcactctggaagacctgaacaccagatggaagcttctgcaggtggccgtcgaggaccgagtcaggcagctgcatgaagcccacagggactttggtccagcatctcagcactttctttccacgtctgtccagggtccctgggagagagccatctcgccaaacaaagtgccctactatatcaaccacgagactcaaacaacttgctgggaccatcccaaaatgacagagctctaccagtctttagctgacctgaataatgtcagattctcagcttataggactgccatgaaactccgaagactgcagaaggccctttgcttggatctcttgagcctgtcagctgcatgtgatgccttggaccagcacaacctcaagcaaaatgaccagcccatggatatcctgcagattattaattgtttgaccactatttatgaccgcctggagcaagagcacaacaatttggtcaacgtccctctctgcgtggatatgtgtctgaactggctgctgaatgtttatgatacgggacgaacagggaggatccgtgtcctgtcttttaaaactggcatcatttccctgtgtaaagcacatttggaagacaagtacagataccttttcaagcaagtggcaagttcaacaggattttgtgaccagcgcaggctgggcctccttctgcatgattctatccaaattccaagacagttgggtgaagttgcatcctttgggggcagtaacattgagccaagtgtccggagctgcttccaatttgctaataataagccagagatcgaagcggccctcttcctagactggatgagactggaaccccagtccatggtgtggctgcccgtcctgcacagagtggctgctgcagaaactgccaagcatcaggccaaatgtaacatctgcaaagagtgtccaatcattggattcaggtacaggagtctaaagcactttaattatgacatctgccaaagctgctttttttctggtcgagttgcaaaaggccataaaatgcactatcccatggtggaatattgcactccgactacatcaggagaagatgttcgagactttgccaaggtactaaaaaacaaatttcgaaccaaaaggtattttgcgaagcatccccgaatgggctacctgccagtgcagactgtcttagagggggacaacatggaaactcccgttactctgatcaacttctggccagtagattctgcgcctgcctcgtcccctcagctttcacacgatgatactcattcacgcattgaacattatgctagcaggctagcagaaatggaaaacagcaatggatcttatctaaatgatagcatctctcctaatgagagcatagatgatgaacatttgttaatccagcattactgccaaagtttgaaccaggactcccccctgagccagcctcgtagtcctgcccagatcttgatttccttagagagtgaggaaagaggggagctagagagaatcctagcagatcttgaggaagaaaacaggaatctgcaagcagaatatgaccgtctaaagcagcagcacgaacataaaggcctgtccccactgccgtcccctcctgaaatgatgcccacctctccccagagtccccgggatgctgagctcattgctgaggccaagctactgcgtcaacacaaaggccgcctggaagccaggatgcaaatcctggaagaccacaataaacagctggagtcacagttacacaggctaaggcagctgctggagcaaccccaggcagaggccaaagtgaatggcacaacggtgtcctctccttctacctctctacagaggtccgacagcagtcagcctatgctgctccgagtggttggcagtcaaacttcggactccatgggtgaggaagatcttctcagtcctccccaggacacaagcacagggttagaggaggtgatggagcaactcaacaactccttccctagttcaagaggaagaaatacccctggaaagccaatgagagaggacacaatgtaggaagtcttttccacatggcagatgatttgggcagagcgatggagtccttagtatcagtcatgacagatgaagaaggagcagaataaatgttttacaactcctgattcccgcatggtttttataatattcatacaacaaagaggattagacagtaagagtttacaagaaataaatctatatttttgtgaagggtagtggtattatactgtagatttcagtagtttctaagtctgttattgttttgttaacaatggcaggttttacacgtctatgcaattgtacaaaaaagttataagaaaactacatgtaaaatcttgatagctaaataacttgccatttctttatatggaacgcattttgggttgtttaaaaatttataacagttataaagaaagattgtaaactaaagtgtgctttataaaaaaaagttgtttataaaaacccctaaaaacaaaacaaacacacacacacacacatacacacacacacacaaaactttgaggcagcgcattgttttgcatccttttggcgtgatatccatatgaaattcatggctttttctttttttgcatattaaagataagacttcctctaccaccacaccaaatgactactacacactgctcatttgagaactgtcagctgagtggggcaggcttgagttttcatttcatatatctatatgtctataagtatataaatactatagttatatagataaagagatacgaatttctatagactgactttttccattttttaaatgttcatgtcacatcctaatagaaagaaattacttctagtcagtcatccaggcttacctgcttggtctagaatggatttttcccggagccggaagccaggaggaaactacaccacactaaaacattgtctacagctccagatgtttctcattttaaacaactttccactgacaacgaaagtaaagtaaagtattggatttttttaaagggaacatgtgaatgaatacacaggacttattatatcagagtgagtaatcggttggttggttgattgattgattgattgatacattcagcttcctgctgctagcaatgccacgatttagatttaatgatgcttcagtggaaatcaatcagaaggtattctgaccttgtgaacatcagaaggtattttttaactcccaagcagtagcaggacgatgatagggctggagggctatggattcccagcccatccctgtgaaggagtaggccactctttaagtgaaggattggatgattgttcataatacataaagttctctgtaattacaactaaattattatgccctcttctcacagtcaaaaggaactgggtggtttggtttttgttgcttttttagatttattgtcccatgtgggatgagtttttaaatgccacaagacataatttaaaataaataaactttgggaaaaggtgtaaaacagtagccccatcacatttgtgatactgacaggtatcaacccagaagcccatgaactgtgtttccatcctttgcatttctctgcgagtagttccacacaggtttgtaagtaagtaagaaagaaggcaaattgattcaaatgttacaaaaaaacccttcttggtggattagacaggttaaatatataaacaaacaaacaaaaattgctcaaaaaagaggagaaaagctcaagaggaaaagctaaggactggtaggaaaaagctttactctttcatgccattttatttctttttgatttttaaatcattcattcaatagataccaccgtgtgacctataattttgcaaatctgttacctctgacatcaagtgtaattagcttttggagagtgggctgacatcaagtgtaattagcttttggagagtgggttttgtccattattaataattaattaattaacatcaaacacggcttctcatgctatttctacctcactttggttttggggtgttcctgataattgtgcacacctgagttcacagcttcaccacttgtccattgcgttattttctttttcctttataattctttctttttccttcataattttcaaaagaaaacccaaagctctaaggtaacaaattaccaaattacatgaagatttggtttttgtcttgcatttttttcctttatgtgacgctggaccttttctttacccaaggatttttaaaactcagatttaaaacaaggggttactttacatcctactaagaagtttaagtaagtaagtttcattctaaaatcagaggtaaatagagtgcataaataattttgttttaatctttttgtttttcttttagacacattagctctggagtgagtctgtcataatatttgaacaaaaattgagagctttattgctgcattttaagcataattaatttggacattatttcgtgttgtgttctttataaccaccaagtattaaactgtaaatcataatgtaactgaagcataaacatcacatggcatgttttgtcattgttttcaggtactgagttcttacttgagtatcataatatattgtgttttaacaccaacactgtaacatttacgaattatttttttaaacttcagttttactgcattttcacaacatatcagacttcaccaaatatatgccttactattgtattatagtactgctttactgtgtatctcaataaagcacgcagttatgttac

SEQ ID NO: 23 - protein, 2344 aa, Homo sapiens
MTEMILLIFFPAYFLNAVRRQKLLEQSIQSAQETEKSLHLIQESLTFIDKQLAAYIADKVDAAQMPQEAQKIQSDLTSHEISLEEMKKHNQGKEAAQRVLSQIDVAQKKLQDVSMKFRLFQKPANFEQRLQESKMILDEVKMHLPALETKSVEQEVVQSQLNHCVNLYKSLSEVKSEVEMVIKTGRQIVQKKQTENPKELDERVTALKLHYNELGAKVTERKQQLEKCLKLSRKMRKEMNVLTEWLAATDMELTKRSAVEGMPSNLDSEVAWGKATQKEIEKQKVHLKSITEVGEALKTVLGKKETLVEDKLSLLNSNWIAVTSRAEEWLNLLLEYQKHMETFDQNVDHITKWIIQADTLLDESEKKKPQQKEDVLKRLKAELNDIRPKVDSTRDQAANLMANRGDHCRKLVEPQISELNHRFAAISHRIKTGKASIPLKELEQFNSDIQKLLEPLEAEIQQGVNLKEEDFNKDMNEDNEGTVKELLQRGDNLQQRITDERKREEIKIKQQLLQTKHNALKDLRSQRRKKALEISHQWYQYKRQADDLLKCLDDIEKKLASLPEPRDERKIKEIDRELQKKKEELNAVRRQAEGLSEDGAAMAVEPTQIQLSKRWREIESKFAQFRRLNFAQIHTVREETMMVMTEDMPLEISYVPSTYLTEITHVSQALLEVEQLLNAPDLCAKDFEDLFKQEESLKNIKDSLQQSSGRIDIIHSKKTAALQSATPVERVKLQEALSQLDFQWEKVNKMYKDRQGRFDRSVEKWRRFHYDIKIFNQWLTEAEQFLRKTQIPENWEHAKYKWYLKELQDGIGQRQTVVRTLNATGEEIIQQSSKTDASILQEKLGSLNLRWQEVCKQLSDRKKRLEEQKNILSEFQRDLNEFVLWLEEADNIASIPLEPGKEQQLKEKLEQVKLLVEELPLRQGILKQLNETGGPVLVSAPISPEEQDKLENKLKQTNLQWIKVSRALPEKQGEIEAQIKDLGQLEKKLEDLEEQLNHLLLWLSPIRNQLEIYNQPNQEGPFDVQETEIAVQAKQPDVEEILSKGQHLYKEKPATQPVKRKLEDLSSEWKAVNRLLQELRAKQPDLAPGLTTIGASPTQTVTLVTQPVVTKETAISKLEMPSSLMLEVPALADFNRAWTELTDWLSLLDQVIKSQRVMVGDLEDINEMIIKQKATMQDLEQRRPQLEELITAAQNLKNKTSNQEARTIITDRIERIQNQWDEVQEHLQNRRQQLNEMLKDSTQWLEAKEEAEQVLGQARAKLESWKEGPYTVDAIQKKITETKQLAKDLRQWQTNVDVANDLALKLLRDYSADDTRKVHMITENINASWRSIHKRVSEREAALEETHRLLQQFPLDLEKFLAWLTEAETTANVLQDATRKERLLEDSKGVKELMKQWQDLQGEIEAHTDVYHNLDENSQKILRSLEGSDDAVLLQRRLDNMNFKWSELRKKSLNIRSHLEASSDQWKRLHLSLQELLVWLQLKDDELSRQAPIGGDFPAVQKQNDVHRAFKRELKTKEPVIMSTLETVRIFLTEQPLEGLEKLYQEPRELPPEERAQNVTRLLRKQAEEVNTEWEKLNLHSADWQRKIDETLERLQELQEATDELDLKLRQAEVIKGSWQPVGDLLIDSLQDHLEKVKALRGEIAPLKENVSHVNDLARQLTTLGIQLSPYNLSTLEDLNTRWKLLQVAVEDRVRQLHEAHRDFGPASQHFLSTSVQGPWERAISPNKVPYYINHETQTTCWDHPKMTELYQSLADLNNVRFSAYRTAMKLRRLQKALCLDLLSLSAACDALDQHNLKQNDQPMDILQIINCLTTIYDRLEQEHNNLVNVPLCVDMCLNWLLNVYDTGRTGRIRVLSFKTGIISLCKAHLEDKYRYLFKQVASSTGFCDQRRLGLLLHDSIQIPRQLGEVASFGGSNIEPSVRSCFQFANNKPEIEAALFLDWMRLEPQSMVWLPVLHRVAAAETAKHQAKCNICKECPIIGFRYRSLKHFNYDICQSCFFSGRVAKGHKMHYPMVEYCTPTTSGEDVRDFAKVLKNKFRTKRYFAKHPRMGYLPVQTVLEGDNMETPVTLINFWPVDSAPASSPQLSHDDTHSRIEHYASRLAEMENSNGSYLNDSISPNESIDDEHLLIQHYCQSLNQDSPLSQPRSPAQILISLESEERGELERILADLEEENRNLQAEYDRLKQQHEHKGLSPLPSPPEMMPTSPQSPRDAELIAEAKLLRQHKGRLEARMQILEDHNKQLESQLHRLRQLLEQPQAEAKVNGTTVSSPSTSLQRSDSSQPMLLRVVGSQTSDSMGEEDLLSPPQDTSTGLEEVMEQLNNSFPSSRGRNTPGKPMREDTM

SEQ ID NO: 24 - DNA, 9914 bp, Homo sapiens
taatgagatcaggaggaacattcgacctgagaaagacagattgcaatgactgagatgattttgctaattttttttccagcctatttccttaatgtacgtgatattgtgattgattttcatgcagagatccctgatcctatagttttgtttgctatttatttttctccttcacattttttttctatcaacagagctgaatgagtgccaggaagctgcgaaatctgtcttacaaaaaggctgtaaggaggcaaaagttgcttgaacagagcatccagtctgcccaggagactgaaaaatccttacacttaatccaggagtccctcacattcattgacaagcagttggcagcttatattgcagacaaggtggacgcagctcaaatgcctcaggaagcccagaaaatccaatctgatttgacaagtcatgagatcagtttagaagaaatgaagaaacataatcaggggaaggaggctgcccaaagagtcctgtctcagattgatgttgcacagaaaaaattacaagatgtctccatgaagtttcgattattccagaaaccagccaattttgagcagcgtctacaagaaagtaagatgattttagatgaagtgaagatgcacttgcctgcattggaaacaaagagtgtggaacaggaagtagtacagtcacagctaaatcattgtgtgaacttgtataaaagtctgagtgaagtgaagtctgaagtggaaatggtgataaagactggacgtcagattgtacagaaaaagcagacggaaaatcccaaagaacttgatgaaagagtaacagctttgaaattgcattataatgagctgggagcaaaggtaacagaaagaaagcaacagttggagaaatgcttgaaattgtcccgtaagatgcgaaaggaaatgaatgtcttgacagaatggctggcagctacagatatggaattgacaaagagatcagcagttgaaggaatgcctagtaatttggattctgaagttgcctggggaaaggctactcaaaaagagattgagaaacagaaggtgcacctgaagagtatcacagaggtaggagaggccttgaaaacagttttgggcaagaaggagacgttggtggaagataaactcagtcttctgaatagtaactggatagctgtcacctcccgagcagaagagtggttaaatcttttgttggaataccagaaacacatggaaacttttgaccagaatgtggaccacatcacaaagtggatcattcaggctgacacacttttggatgaatcagagaaaaagaaaccccagcaaaaagaagacgtgcttaagcgtttaaaggcagaactgaatgacatacgcccaaaggtggactctacacgtgaccaagcagcaaacttgatggcaaaccgcggtgaccactgcaggaaattagtagagccccaaatctcagagctcaaccatcgatttgcagccatttcacacagaattaagactggaaaggcctccattcctttgaaggaattggagcagtttaactcagatatacaaaaattgcttgaaccactggaggctgaaattcagcagggggtgaatctgaaagaggaagacttcaataaagatatgaatgaagacaatgagggtactgtaaaagaattgttgcaaagaggagacaacttacaacaaagaatcacagatgagagaaagcgagaggaaataaagataaaacagcagctgttacagacaaaacataatgctctcaaggatttgaggtctcaaagaagaaaaaaggctctagaaatttctcatcagtggtatcagtacaagaggcaggctgatgatctcctgaaatgcttggatgacattgaaaaaaaattagccagcctacctgagcccagagatgaaaggaaaataaaggaaattgatcgggaattgcagaagaagaaagaggagctgaatgcagtgcgtaggcaagctgagggcttgtctgaggatggggccgcaatggcagtggagccaactcagatccagctcagcaagcgctggcgggaaattgagagcaaatttgctcagtttcgaagactcaactttgcacaaattcacactgtccgtgaagaaacgatgatggtgatgactgaagacatgcctttggaaatttcttatgtgccttctacttatttgactgaaatcactcatgtctcacaagccctattagaagtggaacaacttctcaatgctcctgacctctgtgctaaggactttgaagatctctttaagcaagaggagtctctgaagaatataaaagatagtctacaacaaagctcaggtcggattgacattattcatagcaagaagacagcagcattgcaaagtgcaacgcctgtggaaagggtgaagctacaggaagctctctcccagcttgatttccaatgggaaaaagttaacaaaatgtacaaggaccgacaagggcgatttgacagatctgttgagaaatggcggcgttttcattatgatataaagatatttaatcagtggctaacagaagctgaacagtttctcagaaagacacaaattcctgagaattgggaacatgctaaatacaaatggtatcttaaggaactccaggatggcattgggcagcggcaaactgttgtcagaacattgaatgcaactggggaagaaataattcagcaatcctcaaaaacagatgccagtattctacaggaaaaattgggaagcctgaatctgcggtggcaggaggtctgcaaacagctgtcagacagaaaaaagaggctagaagaacaaaagaatatcttgtcagaatttcaaagagatttaaatgaatttgttttatggttggaggaagcagataacattgctagtatcccacttgaacctggaaaagagcagcaactaaaagaaaagcttgagcaagtcaagttactggtggaagagttgcccctgcgccagggaattctcaaacaattaaatgaaactggaggacccgtgcttgtaagtgctcccataagcccagaagagcaagataaacttgaaaataagctcaagcagacaaatctccagtggataaaggtttccagagctttacctgagaaacaaggagaaattgaagctcaaataaaagaccttgggcagcttgaaaaaaagcttgaagaccttgaagagcagttaaatcatctgctgctgtggttatctcctattaggaatcagttggaaatttataaccaaccaaaccaagaaggaccatttgacgttcaggaaactgaaatagcagttcaagctaaacaaccggatgtggaagagattttgtctaaagggcagcatttgtacaaggaaaaaccagccactcagccagtgaagaggaagttagaagatctgagctctgagtggaaggcggtaaaccgtttacttcaagagctgagggcaaagcagcctgacctagctcctggactgaccactattggagcctctcctactcagactgttactctggtgacacaacctgtggttactaaggaaactgccatctccaaactagaaatgccatcttccttgatgttggaggtacctgctctggcagatttcaaccgggcttggacagaacttaccgactggctttctctgcttgatcaagttataaaatcacagagggtgatggtgggtgaccttgaggatatcaacgagatgatcatcaagcagaaggcaacaatgcaggatttggaacagaggcgtccccagttggaagaactcattaccgctgcccaaaatttgaaaaacaagaccagcaatcaagaggctagaacaatcattacggatcgaattgaaagaattcagaatcagtgggatgaagtacaagaacaccttcagaaccggaggcaacagttgaatgaaatgttaaaggattcaacacaatggctggaagctaaggaagaagctgagcaggtcttaggacaggccagagccaagcttgagtcatggaaggagggtccctatacagtagatgcaatccaaaagaaaatcacagaaaccaagcagttggccaaagacctccgccagtggcagacaaatgtagatgtggcaaatgacttggccctgaaacttctccgggattattctgcagatgataccagaaaagtccacatgataacagagaatatcaatgcctcttggagaagcattcataaaagggtgagtgagcgagaggctgctttggaagaaactcatagattactgcaacagttccccctggacctggaaaagtttcttgcctggcttacagaagctgaaacaactgccaatgtcctacaggatgctacccgtaaggaaaggctcctagaagactccaagggagtaaaagagctgatgaaacaatggcaagacctccaaggtgaaattgaagctcacacagatgtttatcacaacctggatgaaaacagccaaaaaatcctgagatccctggaaggttccgatgatgcagtcctgttacaaagacgtttggataacatgaacttcaagtggagtgaacttcggaaaaagtctctcaacattaggtcccatttggaagccagttctgaccagtggaagcgtctgcacctttctctgcaggaacttctggtgtggctacagctgaaagatgatgaattaagccggcaggcacctattggaggcgactttccagcagttcagaagcagaacgatgtacatagggccttcaagagggaattgaaaactaaagaacctgtaatcatgagtactcttgagactgtacgaatatttctgacagagcagcctttggaaggactagagaaactctaccaggagcccagagagctgcctcctgaggagagagcccagaatgtcactcggcttctacgaaagcaggctgaggaggtcaatactgagtgggaaaaattgaacctgcactccgctgactggcagagaaaaatagatgagacccttgaaagactccaggaacttcaagaggccacggatgagctggacctcaagctgcgccaagctgaggtgatcaagggatcctggcagcccgtgggcgatctcctcattgactctctccaagatcacctcgagaaagtcaaggcacttcgaggagaaattgcgcctctgaaagagaacgtgagccacgtcaatgaccttgctcgccagcttaccactttgggcattcagctctcaccgtataacctcagcactctggaagacctgaacaccagatggaagcttctgcaggtggccgtcgaggaccgagtcaggcagctgcatgaagcccacagggactttggtccagcatctcagcactttctttccacgtctgtccagggtccctgggagagagccatctcgccaaacaaagtgccctactatatcaaccacgagactcaaacaacttgctgggaccatcccaaaatgacagagctctaccagtctttagctgacctgaataatgtcagattctcagcttataggactgccatgaaactccgaagactgcagaaggccctttgcttggatctcttgagcctgtcagctgcatgtgatgccttggaccagcacaacctcaagcaaaatgaccagcccatggatatcctgcagattattaattgtttgaccactatttatgaccgcctggagcaagagcacaacaatttggtcaacgtccctctctgcgtggatatgtgtctgaactggctgctgaatgtttatgatacgggacgaacagggaggatccgtgtcctgtcttttaaaactggcatcatttccctgtgtaaagcacatttggaagacaagtacagataccttttcaagcaagtggcaagttcaacaggattttgtgaccagcgcaggctgggcctccttctgcatgattctatccaaattccaagacagttgggtgaagttgcatcctttgggggcagtaacattgagccaagtgtccggagctgcttccaatttgctaataataagccagagatcgaagcggccctcttcctagactggatgagactggaaccccagtccatggtgtggctgcccgtcctgcacagagtggctgctgcagaaactgccaagcatcaggccaaatgtaacatctgcaaagagtgtccaatcattggattcaggtacaggagtctaaagcactttaattatgacatctgccaaagctgctttttttctggtcgagttgcaaaaggccataaaatgcactatcccatggtggaatattgcactccgactacatcaggagaagatgttcgagactttgccaaggtactaaaaaacaaatttcgaaccaaaaggtattttgcgaagcatccccgaatgggctacctgccagtgcagactgtcttagagggggacaacatggaaactcccgttactctgatcaacttctggccagtagattctgcgcctgcctcgtcccctcagctttcacacgatgatactcattcacgcattgaacattatgctagcaggctagcagaaatggaaaacagcaatggatcttatctaaatgatagcatctctcctaatgagagcatagatgatgaacatttgttaatccagcattactgccaaagtttgaaccaggactcccccctgagccagcctcgtagtcctgcccagatcttgatttccttagagagtgaggaaagaggggagctagagagaatcctagcagatcttgaggaagaaaacaggaatctgcaagcagaatatgaccgtctaaagcagcagcacgaacataaaggcctgtccccactgccgtcccctcctgaaatgatgcccacctctccccagagtccccgggatgctgagctcattgctgaggccaagctactgcgtcaacacaaaggccgcctggaagccaggatgcaaatcctggaagaccacaataaacagctggagtcacagttacacaggctaaggcagctgctggagcaaccccaggcagaggccaaagtgaatggcacaacggtgtcctctccttctacctctctacagaggtccgacagcagtcagcctatgctgctccgagtggttggcagtcaaacttcggactccatgggtgaggaagatcttctcagtcctccccaggacacaagcacagggttagaggaggtgatggagcaactcaacaactccttccctagttcaagaggaagaaatacccctggaaagccaatgagagaggacacaatgtaggaagtcttttccacatggcagatgatttgggcagagcgatggagtccttagtatcagtcatgacagatgaagaaggagcagaataaatgttttacaactcctgattcccgcatggtttttataatattcatacaacaaagaggattagacagtaagagtttacaagaaataaatctatatttttgtgaagggtagtggtattatactgtagatttcagtagtttctaagtctgttattgttttgttaacaatggcaggttttacacgtctatgcaattgtacaaaaaagttataagaaaactacatgtaaaatcttgatagctaaataacttgccatttctttatatggaacgcattttgggttgtttaaaaatttataacagttataaagaaagattgtaaactaaagtgtgctttataaaaaaaagttgtttataaaaacccctaaaaacaaaacaaacacacacacacacacatacacacacacacacaaaactttgaggcagcgcattgttttgcatccttttggcgtgatatccatatgaaattcatggctttttctttttttgcatattaaagataagacttcctctaccaccacaccaaatgactactacacactgctcatttgagaactgtcagctgagtggggcaggcttgagttttcatttcatatatctatatgtctataagtatataaatactatagttatatagataaagagatacgaatttctatagactgactttttccattttttaaatgttcatgtcacatcctaatagaaagaaattacttctagtcagtcatccaggcttacctgcttggtctagaatggatttttcccggagccggaagccaggaggaaactacaccacactaaaacattgtctacagctccagatgtttctcattttaaacaactttccactgacaacgaaagtaaagtaaagtattggatttttttaaagggaacatgtgaatgaatacacaggacttattatatcagagtgagtaatcggttggttggttgattgattgattgattgatacattcagcttcctgctgctagcaatgccacgatttagatttaatgatgcttcagtggaaatcaatcagaaggtattctgaccttgtgaacatcagaaggtattttttaactcccaagcagtagcaggacgatgatagggctggagggctatggattcccagcccatccctgtgaaggagtaggccactctttaagtgaaggattggatgattgttcataatacataaagttctctgtaattacaactaaattattatgccctcttctcacagtcaaaaggaactgggtggtttggtttttgttgcttttttagatttattgtcccatgtgggatgagtttttaaatgccacaagacataatttaaaataaataaactttgggaaaaggtgtaaaacagtagccccatcacatttgtgatactgacaggtatcaacccagaagcccatgaactgtgtttccatcctttgcatttctctgcgagtagttccacacaggtttgtaagtaagtaagaaagaaggcaaattgattcaaatgttacaaaaaaacccttcttggtggattagacaggttaaatatataaacaaacaaacaaaaattgctcaaaaaagaggagaaaagctcaagaggaaaagctaaggactggtaggaaaaagctttactctttcatgccattttatttctttttgatttttaaatcattcattcaatagataccaccgtgtgacctataattttgcaaatctgttacctctgacatcaagtgtaattagcttttggagagtgggctgacatcaagtgtaattagcttttggagagtgggttttgtccattattaataattaattaattaacatcaaacacggcttctcatgctatttctacctcactttggttttggggtgttcctgataattgtgcacacctgagttcacagcttcaccacttgtccattgcgttattttctttttcctttataattctttctttttccttcataattttcaaaagaaaacccaaagctctaaggtaacaaattaccaaattacatgaagatttggtttttgtcttgcatttttttcctttatgtgacgctggaccttttctttacccaaggatttttaaaactcagatttaaaacaaggggttactttacatcctactaagaagtttaagtaagtaagtttcattctaaaatcagaggtaaatagagtgcataaataattttgttttaatctttttgtttttcttttagacacattagctctggagtgagtctgtcataatatttgaacaaaaattgagagctttattgctgcattttaagcataattaatttggacattatttcgtgttgtgttctttataaccaccaagtattaaactgtaaatcataatgtaactgaagcataaacatcacatggcatgttttgtcattgttttcaggtactgagttcttacttgagtatcataatatattgtgttttaacaccaacactgtaacatttacgaattatttttttaaacttcagttttactgcattttcacaacatatcagacttcaccaaatatatgccttactattgtattatagtactgctttactgtgtatctcaataaagcacgcagttatgttac

SEQ ID NO: 25 - protein, 2341 aa, Homo sapiens
MSARKLRNLSYKKAVRRQKLLEQSIQSAQETEKSLHLIQESLTFIDKQLAAYIADKVDAAQMPQEAQKIQSDLTSHEISLEEMKKHNQGKEAAQRVLSQIDVAQKKLQDVSMKFRLFQKPANFEQRLQESKMILDEVKMHLPALETKSVEQEVVQSQLNHCVNLYKSLSEVKSEVEMVIKTGRQIVQKKQTENPKELDERVTALKLHYNELGAKVTERKQQLEKCLKLSRKMRKEMNVLTEWLAATDMELTKRSAVEGMPSNLDSEVAWGKATQKEIEKQKVHLKSITEVGEALKTVLGKKETLVEDKLSLLNSNWIAVTSRAEEWLNLLLEYQKHMETFDQNVDHITKWIIQADTLLDESEKKKPQQKEDVLKRLKAELNDIRPKVDSTRDQAANLMANRGDHCRKLVEPQISELNHRFAAISHRIKTGKASIPLKELEQFNSDIQKLLEPLEAEIQQGVNLKEEDFNKDMNEDNEGTVKELLQRGDNLQQRITDERKREEIKIKQQLLQTKHNALKDLRSQRRKKALEISHQWYQYKRQADDLLKCLDDIEKKLASLPEPRDERKIKEIDRELQKKKEELNAVRRQAEGLSEDGAAMAVEPTQIQLSKRWREIESKFAQFRRLNFAQIHTVREETMMVMTEDMPLEISYVPSTYLTEITHVSQALLEVEQLLNAPDLCAKDFEDLFKQEESLKNIKDSLQQSSGRIDIIHSKKTAALQSATPVERVKLQEALSQLDFQWEKVNKMYKDRQGRFDRSVEKWRRFHYDIKIFNQWLTEAEQFLRKTQIPENWEHAKYKWYLKELQDGIGQRQTVVRTLNATGEEIIQQSSKTDASILQEKLGSLNLRWQEVCKQLSDRKKRLEEQKNILSEFQRDLNEFVLWLEEADNIASIPLEPGKEQQLKEKLEQVKLLVEELPLRQGILKQLNETGGPVLVSAPISPEEQDKLENKLKQTNLQWIKVSRALPEKQGEIEAQIKDLGQLEKKLEDLEEQLNHLLLWLSPIRNQLEIYNQPNQEGPFDVQETEIAVQAKQPDVEEILSKGQHLYKEKPATQPVKRKLEDLSSEWKAVNRLLQELRAKQPDLAPGLTTIGASPTQTVTLVTQPVVTKETAISKLEMPSSLMLEVPALADFNRAWTELTDWLSLLDQVIKSQRVMVGDLEDINEMIIKQKATMQDLEQRRPQLEELITAAQNLKNKTSNQEARTIITDRIERIQNQWDEVQEHLQNRRQQLNEMLKDSTQWLEAKEEAEQVLGQARAKLESWKEGPYTVDAIQKKITETKQLAKDLRQWQTNVDVANDLALKLLRDYSADDTRKVHMITENINASWRSIHKRVSEREAALEETHRLLQQFPLDLEKFLAWLTEAETTANVLQDATRKERLLEDSKGVKELMKQWQDLQGEIEAHTDVYHNLDENSQKILRSLEGSDDAVLLQRRLDNMNFKWSELRKKSLNIRSHLEASSDQWKRLHLSLQELLVWLQLKDDELSRQAPIGGDFPAVQKQNDVHRAFKRELKTKEPVIMSTLETVRIFLTEQPLEGLEKLYQEPRELPPEERAQNVTRLLRKQAEEVNTEWEKLNLHSADWQRKIDETLERLQELQEATDELDLKLRQAEVIKGSWQPVGDLLIDSLQDHLEKVKALRGEIAPLKENVSHVNDLARQLTTLGIQLSPYNLSTLEDLNTRWKLLQVAVEDRVRQLHEAHRDFGPASQHFLSTSVQGPWERAISPNKVPYYINHETQTTCWDHPKMTELYQSLADLNNVRFSAYRTAMKLRRLQKALCLDLLSLSAACDALDQHNLKQNDQPMDILQIINCLTTIYDRLEQEHNNLVNVPLCVDMCLNWLLNVYDTGRTGRIRVLSFKTGIISLCKAHLEDKYRYLFKQVASSTGFCDQRRLGLLLHDSIQIPRQLGEVASFGGSNIEPSVRSCFQFANNKPEIEAALFLDWMRLEPQSMVWLPVLHRVAAAETAKHQAKCNICKECPIIGFRYRSLKHFNYDICQSCFFSGRVAKGHKMHYPMVEYCTPTTSGEDVRDFAKVLKNKFRTKRYFAKHPRMGYLPVQTVLEGDNMETPVTLINFWPVDSAPASSPQLSHDDTHSRIEHYASRLAEMENSNGSYLNDSISPNESIDDEHLLIQHYCQSLNQDSPLSQPRSPAQILISLESEERGELERILADLEEENRNLQAEYDRLKQQHEHKGLSPLPSPPEMMPTSPQSPRDAELIAEAKLLRQHKGRLEARMQILEDHNKQLESQLHRLRQLLEQPQAEAKVNGTTVSSPSTSLQRSDSSQPMLLRVVGSQTSDSMGEEDLLSPPQDTSTGLEEVMEQLNNSFPSSRGRNTPGKPMREDTM

SEQ ID NO: 26 - DNA, 7410 bp, Homo sapiens
acactagcaatggcaaagctttgtgcggaggcattgctggctgctctgaactaaaagcatccgtggggaccgaaagaggtttttgcacaccttattaaggaactccaggatggcattgggcagcggcaaactgttgtcagaacattgaatgcaactggggaagaaataattcagcaatcctcaaaaacagatgccagtattctacaggaaaaattgggaagcctgaatctgcggtggcaggaggtctgcaaacagctgtcagacagaaaaaagaggctagaagaacaaaagaatatcttgtcagaatttcaaagagatttaaatgaatttgttttatggttggaggaagcagataacattgctagtatcccacttgaacctggaaaagagcagcaactaaaagaaaagcttgagcaagtcaagttactggtggaagagttgcccctgcgccagggaattctcaaacaattaaatgaaactggaggacccgtgcttgtaagtgctcccataagcccagaagagcaagataaacttgaaaataagctcaagcagacaaatctccagtggataaaggtttccagagctttacctgagaaacaaggagaaattgaagctcaaataaaagaccttgggcagcttgaaaaaaagcttgaagaccttgaagagcagttaaatcatctgctgctgtggttatctcctattaggaatcagttggaaatttataaccaaccaaaccaagaaggaccatttgacgttcaggaaactgaaatagcagttcaagctaaacaaccggatgtggaagagattttgtctaaagggcagcatttgtacaaggaaaaaccagccactcagccagtgaagaggaagttagaagatctgagctctgagtggaaggcggtaaaccgtttacttcaagagctgagggcaaagcagcctgacctagctcctggactgaccactattggagcctctcctactcagactgttactctggtgacacaacctgtggttactaaggaaactgccatctccaaactagaaatgccatcttccttgatgttggaggtacctgctctggcagatttcaaccgggcttggacagaacttaccgactggctttctctgcttgatcaagttataaaatcacagagggtgatggtgggtgaccttgaggatatcaacgagatgatcatcaagcagaaggcaacaatgcaggatttggaacagaggcgtccccagttggaagaactcattaccgctgcccaaaatttgaaaaacaagaccagcaatcaagaggctagaacaatcattacggatcgaattgaaagaattcagaatcagtgggatgaagtacaagaacaccttcagaaccggaggcaacagttgaatgaaatgttaaaggattcaacacaatggctggaagctaaggaagaagctgagcaggtcttaggacaggccagagccaagcttgagtcatggaaggagggtccctatacagtagatgcaatccaaaagaaaatcacagaaaccaagcagttggccaaagacctccgccagtggcagacaaatgtagatgtggcaaatgacttggccctgaaacttctccgggattattctgcagatgataccagaaaagtccacatgataacagagaatatcaatgcctcttggagaagcattcataaaagggtgagtgagcgagaggctgctttggaagaaactcatagattactgcaacagttccccctggacctggaaaagtttcttgcctggcttacagaagctgaaacaactgccaatgtcctacaggatgctacccgtaaggaaaggctcctagaagactccaagggagtaaaagagctgatgaaacaatggcaagacctccaaggtgaaattgaagctcacacagatgtttatcacaacctggatgaaaacagccaaaaaatcctgagatccctggaaggttccgatgatgcagtcctgttacaaagacgtttggataacatgaacttcaagtggagtgaacttcggaaaaagtctctcaacattaggtcccatttggaagccagttctgaccagtggaagcgtctgcacctttctctgcaggaacttctggtgtggctacagctgaaagatgatgaattaagccggcaggcacctattggaggcgactttccagcagttcagaagcagaacgatgtacatagggccttcaagagggaattgaaaactaaagaacctgtaatcatgagtactcttgagactgtacgaatatttctgacagagcagcctttggaaggactagagaaactctaccaggagcccagagagctgcctcctgaggagagagcccagaatgtcactcggcttctacgaaagcaggctgaggaggtcaatactgagtgggaaaaattgaacctgcactccgctgactggcagagaaaaatagatgagacccttgaaagactccaggaacttcaagaggccacggatgagctggacctcaagctgcgccaagctgaggtgatcaagggatcctggcagcccgtgggcgatctcctcattgactctctccaagatcacctcgagaaagtcaaggcacttcgaggagaaattgcgcctctgaaagagaacgtgagccacgtcaatgaccttgctcgccagcttaccactttgggcattcagctctcaccgtataacctcagcactctggaagacctgaacaccagatggaagcttctgcaggtggccgtcgaggaccgagtcaggcagctgcatgaagcccacagggactttggtccagcatctcagcactttctttccacgtctgtccagggtccctgggagagagccatctcgccaaacaaagtgccctactatatcaaccacgagactcaaacaacttgctgggaccatcccaaaatgacagagctctaccagtctttagctgacctgaataatgtcagattctcagcttataggactgccatgaaactccgaagactgcagaaggccctttgcttggatctcttgagcctgtcagctgcatgtgatgccttggaccagcacaacctcaagcaaaatgaccagcccatggatatcctgcagattattaattgtttgaccactatttatgaccgcctggagcaagagcacaacaatttggtcaacgtccctctctgcgtggatatgtgtctgaactggctgctgaatgtttatgatacgggacgaacagggaggatccgtgtcctgtcttttaaaactggcatcatttccctgtgtaaagcacatttggaagacaagtacagataccttttcaagcaagtggcaagttcaacaggattttgtgaccagcgcaggctgggcctccttctgcatgattctatccaaattccaagacagttgggtgaagttgcatcctttgggggcagtaacattgagccaagtgtccggagctgcttccaatttgctaataataagccagagatcgaagcggccctcttcctagactggatgagactggaaccccagtccatggtgtggctgcccgtcctgcacagagtggctgctgcagaaactgccaagcatcaggccaaatgtaacatctgcaaagagtgtccaatcattggattcaggtacaggagtctaaagcactttaattatgacatctgccaaagctgctttttttctggtcgagttgcaaaaggccataaaatgcactatcccatggtggaatattgcactccgactacatcaggagaagatgttcgagactttgccaaggtactaaaaaacaaatttcgaaccaaaaggtattttgcgaagcatccccgaatgggctacctgccagtgcagactgtcttagagggggacaacatggaaactcccgttactctgatcaacttctggccagtagattctgcgcctgcctcgtcccctcagctttcacacgatgatactcattcacgcattgaacattatgctagcaggctagcagaaatggaaaacagcaatggatcttatctaaatgatagcatctctcctaatgagagcatagatgatgaacatttgttaatccagcattactgccaaagtttgaaccaggactcccccctgagccagcctcgtagtcctgcccagatcttgatttccttagagagtgaggaaagaggggagctagagagaatcctagcagatcttgaggaagaaaacaggaatctgcaagcagaatatgaccgtctaaagcagcagcacgaacataaaggcctgtccccactgccgtcccctcctgaaatgatgcccacctctccccagagtccccgggatgctgagctcattgctgaggccaagctactgcgtcaacacaaaggccgcctggaagccaggatgcaaatcctggaagaccacaataaacagctggagtcacagttacacaggctaaggcagctgctggagcaaccccaggcagaggccaaagtgaatggcacaacggtgtcctctccttctacctctctacagaggtccgacagcagtcagcctatgctgctccgagtggttggcagtcaaacttcggactccatgggtgaggaagatcttctcagtcctccccaggacacaagcacagggttagaggaggtgatggagcaactcaacaactccttccctagttcaagaggaagaaatacccctggaaagccaatgagagaggacacaatgtaggaagtcttttccacatggcagatgatttgggcagagcgatggagtccttagtatcagtcatgacagatgaagaaggagcagaataaatgttttacaactcctgattcccgcatggtttttataatattcatacaacaaagaggattagacagtaagagtttacaagaaataaatctatatttttgtgaagggtagtggtattatactgtagatttcagtagtttctaagtctgttattgttttgttaacaatggcaggttttacacgtctatgcaattgtacaaaaaagttataagaaaactacatgtaaaatcttgatagctaaataacttgccatttctttatatggaacgcattttgggttgtttaaaaatttataacagttataaagaaagattgtaaactaaagtgtgctttataaaaaaaagttgtttataaaaacccctaaaaacaaaacaaacacacacacacacacatacacacacacacacaaaactttgaggcagcgcattgttttgcatccttttggcgtgatatccatatgaaattcatggctttttctttttttgcatattaaagataagacttcctctaccaccacaccaaatgactactacacactgctcatttgagaactgtcagctgagtggggcaggcttgagttttcatttcatatatctatatgtctataagtatataaatactatagttatatagataaagagatacgaatttctatagactgactttttccattttttaaatgttcatgtcacatcctaatagaaagaaattacttctagtcagtcatccaggcttacctgcttggtctagaatggatttttcccggagccggaagccaggaggaaactacaccacactaaaacattgtctacagctccagatgtttctcattttaaacaactttccactgacaacgaaagtaaagtaaagtattggatttttttaaagggaacatgtgaatgaatacacaggacttattatatcagagtgagtaatcggttggttggttgattgattgattgattgatacattcagcttcctgctgctagcaatgccacgatttagatttaatgatgcttcagtggaaatcaatcagaaggtattctgaccttgtgaacatcagaaggtattttttaactcccaagcagtagcaggacgatgatagggctggagggctatggattcccagcccatccctgtgaaggagtaggccactctttaagtgaaggattggatgattgttcataatacataaagttctctgtaattacaactaaattattatgccctcttctcacagtcaaaaggaactgggtggtttggtttttgttgcttttttagatttattgtcccatgtgggatgagtttttaaatgccacaagacataatttaaaataaataaactttgggaaaaggtgtaaaacagtagccccatcacatttgtgatactgacaggtatcaacccagaagcccatgaactgtgtttccatcctttgcatttctctgcgagtagttccacacaggtttgtaagtaagtaagaaagaaggcaaattgattcaaatgttacaaaaaaacccttcttggtggattagacaggttaaatatataaacaaacaaacaaaaattgctcaaaaaagaggagaaaagctcaagaggaaaagctaaggactggtaggaaaaagctttactctttcatgccattttatttctttttgatttttaaatcattcattcaatagataccaccgtgtgacctataattttgcaaatctgttacctctgacatcaagtgtaattagcttttggagagtgggctgacatcaagtgtaattagcttttggagagtgggttttgtccattattaataattaattaattaacatcaaacacggcttctcatgctatttctacctcactttggttttggggtgttcctgataattgtgcacacctgagttcacagcttcaccacttgtccattgcgttattttctttttcctttataattctttctttttccttcataattttcaaaagaaaacccaaagctctaaggtaacaaattaccaaattacatgaagatttggtttttgtcttgcatttttttcctttatgtgacgctggaccttttctttacccaaggatttttaaaactcagatttaaaacaaggggttactttacatcctactaagaagtttaagtaagtaagtttcattctaaaatcagaggtaaatagagtgcataaataattttgttttaatctttttgtttttcttttagacacattagctctggagtgagtctgtcataatatttgaacaaaaattgagagctttattgctgcattttaagcataattaatttggacattatttcgtgttgtgttctttataaccaccaagtattaaactgtaaatcataatgtaactgaagcataaacatcacatggcatgttttgtcattgttttcaggtactgagttcttacttgagtatcataatatattgtgttttaacaccaacactgtaacatttacgaattatttttttaaacttcagttttactgcattttcacaacatatcagacttcaccaaatatatgccttactattgtattatagtactgctttactgtgtatctcaataaagcacgcagttatgttac

SEQ ID NO: 27 - protein, 1225 aa, Homo sapiens
MPSSLMLEVPALADFNRAWTELTDWLSLLDQVIKSQRVMVGDLEDINEMIIKQKATMQDLEQRRPQLEELITAAQNLKNKTSNQEARTIITDRIERIQNQWDEVQEHLQNRRQQLNEMLKDSTQWLEAKEEAEQVLGQARAKLESWKEGPYTVDAIQKKITETKQLAKDLRQWQTNVDVANDLALKLLRDYSADDTRKVHMITENINASWRSIHKRVSEREAALEETHRLLQQFPLDLEKFLAWLTEAETTANVLQDATRKERLLEDSKGVKELMKQWQDLQGEIEAHTDVYHNLDENSQKILRSLEGSDDAVLLQRRLDNMNFKWSELRKKSLNIRSHLEASSDQWKRLHLSLQELLVWLQLKDDELSRQAPIGGDFPAVQKQNDVHRAFKRELKTKEPVIMSTLETVRIFLTEQPLEGLEKLYQEPRELPPEERAQNVTRLLRKQAEEVNTEWEKLNLHSADWQRKIDETLERLQELQEATDELDLKLRQAEVIKGSWQPVGDLLIDSLQDHLEKVKALRGEIAPLKENVSHVNDLARQLTTLGIQLSPYNLSTLEDLNTRWKLLQVAVEDRVRQLHEAHRDFGPASQHFLSTSVQGPWERAISPNKVPYYINHETQTTCWDHPKMTELYQSLADLNNVRFSAYRTAMKLRRLQKALCLDLLSLSAACDALDQHNLKQNDQPMDILQIINCLTTIYDRLEQEHNNLVNVPLCVDMCLNWLLNVYDTGRTGRIRVLSFKTGIISLCKAHLEDKYRYLFKQVASSTGFCDQRRLGLLLHDSIQIPRQLGEVASFGGSNIEPSVRSCFQFANNKPEIEAALFLDWMRLEPQSMVWLPVLHRVAAAETAKHQAKCNICKECPIIGFRYRSLKHFNYDICQSCFFSGRVAKGHKMHYPMVEYCTPTTSGEDVRDFAKVLKNKFRTKRYFAKHPRMGYLPVQTVLEGDNMETPVTLINFWPVDSAPASSPQLSHDDTHSRIEHYASRLAEMENSNGSYLNDSISPNESIDDEHLLIQHYCQSLNQDSPLSQPRSPAQILISLESEERGELERILADLEEENRNLQAEYDRLKQQHEHKGLSPLPSPPEMMPTSPQSPRDAELIAEAKLLRQHKGRLEARMQILEDHNKQLESQLHRLRQLLEQPQAEAKVNGTTVSSPSTSLQRSDSSQPMLLRVVGSQTSDSMGEEDLLSPPQDTSTGLEEVMEQLNNSFPSSRGRNTPGKPMREDTM

SEQ ID NO: 28 - DNA, 5623 bp, Homo sapiens
gggttttctcaggattgctatgcaacaggatcagtgctgtagtgcccggttcaagctgaaaatgttacacaggaagacataccatgtaaaggacctccaaggtgaaattgaagctcacacagatgtttatcacaacctggatgaaaacagccaaaaaatcctgagatccctggaaggttccgatgatgcagtcctgttacaaagacgtttggataacatgaacttcaagtggagtgaacttcggaaaaagtctctcaacattaggtcccatttggaagccagttctgaccagtggaagcgtctgcacctttctctgcaggaacttctggtgtggctacagctgaaagatgatgaattaagccggcaggcacctattggaggcgactttccagcagttcagaagcagaacgatgtacatagggccttcaagagggaattgaaaactaaagaacctgtaatcatgagtactcttgagactgtacgaatatttctgacagagcagcctttggaaggactagagaaactctaccaggagcccagagagctgcctcctgaggagagagcccagaatgtcactcggcttctacgaaagcaggctgaggaggtcaatactgagtgggaaaaattgaacctgcactccgctgactggcagagaaaaatagatgagacccttgaaagactccaggaacttcaagaggccacggatgagctggacctcaagctgcgccaagctgaggtgatcaagggatcctggcagcccgtgggcgatctcctcattgactctctccaagatcacctcgagaaagtcaaggcacttcgaggagaaattgcgcctctgaaagagaacgtgagccacgtcaatgaccttgctcgccagcttaccactttgggcattcagctctcaccgtataacctcagcactctggaagacctgaacaccagatggaagcttctgcaggtggccgtcgaggaccgagtcaggcagctgcatgaagcccacagggactttggtccagcatctcagcactttctttccacgtctgtccagggtccctgggagagagccatctcgccaaacaaagtgccctactatatcaaccacgagactcaaacaacttgctgggaccatcccaaaatgacagagctctaccagtctttagctgacctgaataatgtcagattctcagcttataggactgccatgaaactccgaagactgcagaaggccctttgcttggatctcttgagcctgtcagctgcatgtgatgccttggaccagcacaacctcaagcaaaatgaccagcccatggatatcctgcagattattaattgtttgaccactatttatgaccgcctggagcaagagcacaacaatttggtcaacgtccctctctgcgtggatatgtgtctgaactggctgctgaatgtttatgatacgggacgaacagggaggatccgtgtcctgtcttttaaaactggcatcatttccctgtgtaaagcacatttggaagacaagtacagataccttttcaagcaagtggcaagttcaacaggattttgtgaccagcgcaggctgggcctccttctgcatgattctatccaaattccaagacagttgggtgaagttgcatcctttgggggcagtaacattgagccaagtgtccggagctgcttccaatttgctaataataagccagagatcgaagcggccctcttcctagactggatgagactggaaccccagtccatggtgtggctgcccgtcctgcacagagtggctgctgcagaaactgccaagcatcaggccaaatgtaacatctgcaaagagtgtccaatcattggattcaggtacaggagtctaaagcactttaattatgacatctgccaaagctgctttttttctggtcgagttgcaaaaggccataaaatgcactatcccatggtggaatattgcactccgactacatcaggagaagatgttcgagactttgccaaggtactaaaaaacaaatttcgaaccaaaaggtattttgcgaagcatccccgaatgggctacctgccagtgcagactgtcttagagggggacaacatggaaactcccgttactctgatcaacttctggccagtagattctgcgcctgcctcgtcccctcagctttcacacgatgatactcattcacgcattgaacattatgctagcaggctagcagaaatggaaaacagcaatggatcttatctaaatgatagcatctctcctaatgagagcatagatgatgaacatttgttaatccagcattactgccaaagtttgaaccaggactcccccctgagccagcctcgtagtcctgcccagatcttgatttccttagagagtgaggaaagaggggagctagagagaatcctagcagatcttgaggaagaaaacaggaatctgcaagcagaatatgaccgtctaaagcagcagcacgaacataaaggcctgtccccactgccgtcccctcctgaaatgatgcccacctctccccagagtccccgggatgctgagctcattgctgaggccaagctactgcgtcaacacaaaggccgcctggaagccaggatgcaaatcctggaagaccacaataaacagctggagtcacagttacacaggctaaggcagctgctggagcaaccccaggcagaggccaaagtgaatggcacaacggtgtcctctccttctacctctctacagaggtccgacagcagtcagcctatgctgctccgagtggttggcagtcaaacttcggactccatgggtgaggaagatcttctcagtcctccccaggacacaagcacagggttagaggaggtgatggagcaactcaacaactccttccctagttcaagaggaagaaatacccctggaaagccaatgagagaggacacaatgtaggaagtcttttccacatggcagatgatttgggcagagcgatggagtccttagtatcagtcatgacagatgaagaaggagcagaataaatgttttacaactcctgattcccgcatggtttttataatattcatacaacaaagaggattagacagtaagagtttacaagaaataaatctatatttttgtgaagggtagtggtattatactgtagatttcagtagtttctaagtctgttattgttttgttaacaatggcaggttttacacgtctatgcaattgtacaaaaaagttataagaaaactacatgtaaaatcttgatagctaaataacttgccatttctttatatggaacgcattttgggttgtttaaaaatttataacagttataaagaaagattgtaaactaaagtgtgctttataaaaaaaagttgtttataaaaacccctaaaaacaaaacaaacacacacacacacacatacacacacacacacaaaactttgaggcagcgcattgttttgcatccttttggcgtgatatccatatgaaattcatggctttttctttttttgcatattaaagataagacttcctctaccaccacaccaaatgactactacacactgctcatttgagaactgtcagctgagtggggcaggcttgagttttcatttcatatatctatatgtctataagtatataaatactatagttatatagataaagagatacgaatttctatagactgactttttccattttttaaatgttcatgtcacatcctaatagaaagaaattacttctagtcagtcatccaggcttacctgcttggtctagaatggatttttcccggagccggaagccaggaggaaactacaccacactaaaacattgtctacagctccagatgtttctcattttaaacaactttccactgacaacgaaagtaaagtaaagtattggatttttttaaagggaacatgtgaatgaatacacaggacttattatatcagagtgagtaatcggttggttggttgattgattgattgattgatacattcagcttcctgctgctagcaatgccacgatttagatttaatgatgcttcagtggaaatcaatcagaaggtattctgaccttgtgaacatcagaaggtattttttaactcccaagcagtagcaggacgatgatagggctggagggctatggattcccagcccatccctgtgaaggagtaggccactctttaagtgaaggattggatgattgttcataatacataaagttctctgtaattacaactaaattattatgccctcttctcacagtcaaaaggaactgggtggtttggtttttgttgcttttttagatttattgtcccatgtgggatgagtttttaaatgccacaagacataatttaaaataaataaactttgggaaaaggtgtaaaacagtagccccatcacatttgtgatactgacaggtatcaacccagaagcccatgaactgtgtttccatcctttgcatttctctgcgagtagttccacacaggtttgtaagtaagtaagaaagaaggcaaattgattcaaatgttacaaaaaaacccttcttggtggattagacaggttaaatatataaacaaacaaacaaaaattgctcaaaaaagaggagaaaagctcaagaggaaaagctaaggactggtaggaaaaagctttactctttcatgccattttatttctttttgatttttaaatcattcattcaatagataccaccgtgtgacctataattttgcaaatctgttacctctgacatcaagtgtaattagcttttggagagtgggctgacatcaagtgtaattagcttttggagagtgggttttgtccattattaataattaattaattaacatcaaacacggcttctcatgctatttctacctcactttggttttggggtgttcctgataattgtgcacacctgagttcacagcttcaccacttgtccattgcgttattttctttttcctttataattctttctttttccttcataattttcaaaagaaaacccaaagctctaaggtaacaaattaccaaattacatgaagatttggtttttgtcttgcatttttttcctttatgtgacgctggaccttttctttacccaaggatttttaaaactcagatttaaaacaaggggttactttacatcctactaagaagtttaagtaagtaagtttcattctaaaatcagaggtaaatagagtgcataaataattttgttttaatctttttgtttttcttttagacacattagctctggagtgagtctgtcataatatttgaacaaaaattgagagctttattgctgcattttaagcataattaatttggacattatttcgtgttgtgttctttataaccaccaagtattaaactgtaaatcataatgtaactgaagcataaacatcacatggcatgttttgtcattgttttcaggtactgagttcttacttgagtatcataatatattgtgttttaacaccaacactgtaacatttacgaattatttttttaaacttcagttttactgcattttcacaacatatcagacttcaccaaatatatgccttactattgtattatagtactgctttactgtgtatctcaataaagcacgcagttatgttac

SEQ ID NO: 29 - protein, 956 aa, Homo sapiens
MLHRKTYHVKDLQGEIEAHTDVYHNLDENSQKILRSLEGSDDAVLLQRRLDNMNFKWSELRKKSLNIRSHLEASSDQWKRLHLSLQELLVWLQLKDDELSRQAPIGGDFPAVQKQNDVHRAFKRELKTKEPVIMSTLETVRIFLTEQPLEGLEKLYQEPRELPPEERAQNVTRLLRKQAEEVNTEWEKLNLHSADWQRKIDETLERLQELQEATDELDLKLRQAEVIKGSWQPVGDLLIDSLQDHLEKVKALRGEIAPLKENVSHVNDLARQLTTLGIQLSPYNLSTLEDLNTRWKLLQVAVEDRVRQLHEAHRDFGPASQHFLSTSVQGPWERAISPNKVPYYINHETQTTCWDHPKMTELYQSLADLNNVRFSAYRTAMKLRRLQKALCLDLLSLSAACDALDQHNLKQNDQPMDILQIINCLTTIYDRLEQEHNNLVNVPLCVDMCLNWLLNVYDTGRTGRIRVLSFKTGIISLCKAHLEDKYRYLFKQVASSTGFCDQRRLGLLLHDSIQIPRQLGEVASFGGSNIEPSVRSCFQFANNKPEIEAALFLDWMRLEPQSMVWLPVLHRVAAAETAKHQAKCNICKECPIIGFRYRSLKHFNYDICQSCFFSGRVAKGHKMHYPMVEYCTPTTSGEDVRDFAKVLKNKFRTKRYFAKHPRMGYLPVQTVLEGDNMETPVTLINFWPVDSAPASSPQLSHDDTHSRIEHYASRLAEMENSNGSYLNDSISPNESIDDEHLLIQHYCQSLNQDSPLSQPRSPAQILISLESEERGELERILADLEEENRNLQAEYDRLKQQHEHKGLSPLPSPPEMMPTSPQSPRDAELIAEAKLLRQHKGRLEARMQILEDHNKQLESQLHRLRQLLEQPQAEAKVNGTTVSSPSTSLQRSDSSQPMLLRVVGSQTSDSMGEEDLLSPPQDTSTGLEEVMEQLNNSFPSSRGRNTPGKPMREDTM

SEQ ID NO: 30 - DNA, 4623 bp, Homo sapiens
actttcggggagcccggcggctctgggaagctcactcctccactcgtacccacactcgaccgcggagcccttgcagccatgagggaacagctcaaaggccacgagactcaaacaacttgctgggaccatcccaaaatgacagagctctaccagtctttagctgacctgaataatgtcagattctcagcttataggactgccatgaaactccgaagactgcagaaggccctttgcttggatctcttgagcctgtcagctgcatgtgatgccttggaccagcacaacctcaagcaaaatgaccagcccatggatatcctgcagattattaattgtttgaccactatttatgaccgcctggagcaagagcacaacaatttggtcaacgtccctctctgcgtggatatgtgtctgaactggctgctgaatgtttatgatacgggacgaacagggaggatccgtgtcctgtcttttaaaactggcatcatttccctgtgtaaagcacatttggaagacaagtacagataccttttcaagcaagtggcaagttcaacaggattttgtgaccagcgcaggctgggcctccttctgcatgattctatccaaattccaagacagttgggtgaagttgcatcctttgggggcagtaacattgagccaagtgtccggagctgcttccaatttgctaataataagccagagatcgaagcggccctcttcctagactggatgagactggaaccccagtccatggtgtggctgcccgtcctgcacagagtggctgctgcagaaactgccaagcatcaggccaaatgtaacatctgcaaagagtgtccaatcattggattcaggtacaggagtctaaagcactttaattatgacatctgccaaagctgctttttttctggtcgagttgcaaaaggccataaaatgcactatcccatggtggaatattgcactccgactacatcaggagaagatgttcgagactttgccaaggtactaaaaaacaaatttcgaaccaaaaggtattttgcgaagcatccccgaatgggctacctgccagtgcagactgtcttagagggggacaacatggaaactcccgttactctgatcaacttctggccagtagattctgcgcctgcctcgtcccctcagctttcacacgatgatactcattcacgcattgaacattatgctagcaggctagcagaaatggaaaacagcaatggatcttatctaaatgatagcatctctcctaatgagagcatagatgatgaacatttgttaatccagcattactgccaaagtttgaaccaggactcccccctgagccagcctcgtagtcctgcccagatcttgatttccttagagagtgaggaaagaggggagctagagagaatcctagcagatcttgaggaagaaaacaggaatctgcaagcagaatatgaccgtctaaagcagcagcacgaacataaaggcctgtccccactgccgtcccctcctgaaatgatgcccacctctccccagagtccccgggatgctgagctcattgctgaggccaagctactgcgtcaacacaaaggccgcctggaagccaggatgcaaatcctggaagaccacaataaacagctggagtcacagttacacaggctaaggcagctgctggagcaaccccaggcagaggccaaagtgaatggcacaacggtgtcctctccttctacctctctacagaggtccgacagcagtcagcctatgctgctccgagtggttggcagtcaaacttcggactccatgggtgaggaagatcttctcagtcctccccaggacacaagcacagggttagaggaggtgatggagcaactcaacaactccttccctagttcaagaggaagaaatacccctggaaagccaatgagagaggacacaatgtaggaagtcttttccacatggcagatgatttgggcagagcgatggagtccttagtatcagtcatgacagatgaagaaggagcagaataaatgttttacaactcctgattcccgcatggtttttataatattcatacaacaaagaggattagacagtaagagtttacaagaaataaatctatatttttgtgaagggtagtggtattatactgtagatttcagtagtttctaagtctgttattgttttgttaacaatggcaggttttacacgtctatgcaattgtacaaaaaagttataagaaaactacatgtaaaatcttgatagctaaataacttgccatttctttatatggaacgcattttgggttgtttaaaaatttataacagttataaagaaagattgtaaactaaagtgtgctttataaaaaaaagttgtttataaaaacccctaaaaacaaaacaaacacacacacacacacatacacacacacacacaaaactttgaggcagcgcattgttttgcatccttttggcgtgatatccatatgaaattcatggctttttctttttttgcatattaaagataagacttcctctaccaccacaccaaatgactactacacactgctcatttgagaactgtcagctgagtggggcaggcttgagttttcatttcatatatctatatgtctataagtatataaatactatagttatatagataaagagatacgaatttctatagactgactttttccattttttaaatgttcatgtcacatcctaatagaaagaaattacttctagtcagtcatccaggcttacctgcttggtctagaatggatttttcccggagccggaagccaggaggaaactacaccacactaaaacattgtctacagctccagatgtttctcattttaaacaactttccactgacaacgaaagtaaagtaaagtattggatttttttaaagggaacatgtgaatgaatacacaggacttattatatcagagtgagtaatcggttggttggttgattgattgattgattgatacattcagcttcctgctgctagcaatgccacgatttagatttaatgatgcttcagtggaaatcaatcagaaggtattctgaccttgtgaacatcagaaggtattttttaactcccaagcagtagcaggacgatgatagggctggagggctatggattcccagcccatccctgtgaaggagtaggccactctttaagtgaaggattggatgattgttcataatacataaagttctctgtaattacaactaaattattatgccctcttctcacagtcaaaaggaactgggtggtttggtttttgttgcttttttagatttattgtcccatgtgggatgagtttttaaatgccacaagacataatttaaaataaataaactttgggaaaaggtgtaaaacagtagccccatcacatttgtgatactgacaggtatcaacccagaagcccatgaactgtgtttccatcctttgcatttctctgcgagtagttccacacaggtttgtaagtaagtaagaaagaaggcaaattgattcaaatgttacaaaaaaacccttcttggtggattagacaggttaaatatataaacaaacaaacaaaaattgctcaaaaaagaggagaaaagctcaagaggaaaagctaaggactggtaggaaaaagctttactctttcatgccattttatttctttttgatttttaaatcattcattcaatagataccaccgtgtgacctataattttgcaaatctgttacctctgacatcaagtgtaattagcttttggagagtgggctgacatcaagtgtaattagcttttggagagtgggttttgtccattattaataattaattaattaacatcaaacacggcttctcatgctatttctacctcactttggttttggggtgttcctgataattgtgcacacctgagttcacagcttcaccacttgtccattgcgttattttctttttcctttataattctttctttttccttcataattttcaaaagaaaacccaaagctctaaggtaacaaattaccaaattacatgaagatttggtttttgtcttgcatttttttcctttatgtgacgctggaccttttctttacccaaggatttttaaaactcagatttaaaacaaggggttactttacatcctactaagaagtttaagtaagtaagtttcattctaaaatcagaggtaaatagagtgcataaataattttgttttaatctttttgtttttcttttagacacattagctctggagtgagtctgtcataatatttgaacaaaaattgagagctttattgctgcattttaagcataattaatttggacattatttcgtgttgtgttctttataaccaccaagtattaaactgtaaatcataatgtaactgaagcataaacatcacatggcatgttttgtcattgttttcaggtactgagttcttacttgagtatcataatatattgtgttttaacaccaacactgtaacatttacgaattatttttttaaacttcagttttactgcattttcacaacatatcagacttcaccaaatatatgccttactattgtattatagtactgctttactgtgtatctcaataaagcacgcagttatgttac

SEQ ID NO: 31 - protein, 617 aa, Homo sapiens
MREQLKGHETQTTCWDHPKMTELYQSLADLNNVRFSAYRTAMKLRRLQKALCLDLLSLSAACDALDQHNLKQNDQPMDILQIINCLTTIYDRLEQEHNNLVNVPLCVDMCLNWLLNVYDTGRTGRIRVLSFKTGIISLCKAHLEDKYRYLFKQVASSTGFCDQRRLGLLLHDSIQIPRQLGEVASFGGSNIEPSVRSCFQFANNKPEIEAALFLDWMRLEPQSMVWLPVLHRVAAAETAKHQAKCNICKECPIIGFRYRSLKHFNYDICQSCFFSGRVAKGHKMHYPMVEYCTPTTSGEDVRDFAKVLKNKFRTKRYFAKHPRMGYLPVQTVLEGDNMETPVTLINFWPVDSAPASSPQLSHDDTHSRIEHYASRLAEMENSNGSYLNDSISPNESIDDEHLLIQHYCQSLNQDSPLSQPRSPAQILISLESEERGELERILADLEEENRNLQAEYDRLKQQHEHKGLSPLPSPPEMMPTSPQSPRDAELIAEAKLLRQHKGRLEARMQILEDHNKQLESQLHRLRQLLEQPQAEAKVNGTTVSSPSTSLQRSDSSQPMLLRVVGSQTSDSMGEEDLLSPPQDTSTGLEEVMEQLNNSFPSSRGRNTPGKPMREDTM

SEQ ID NO: 32 - DNA, 4591 bp, Homo sapiens
actttcggggagcccggcggctctgggaagctcactcctccactcgtacccacactcgaccgcggagcccttgcagccatgagggaacagctcaaaggccacgagactcaaacaacttgctgggaccatcccaaaatgacagagctctaccagtctttagctgacctgaataatgtcagattctcagcttataggactgccatgaaactccgaagactgcagaaggccctttgcttggatctcttgagcctgtcagctgcatgtgatgccttggaccagcacaacctcaagcaaaatgaccagcccatggatatcctgcagattattaattgtttgaccactatttatgaccgcctggagcaagagcacaacaatttggtcaacgtccctctctgcgtggatatgtgtctgaactggctgctgaatgtttatgatacgggacgaacagggaggatccgtgtcctgtcttttaaaactggcatcatttccctgtgtaaagcacatttggaagacaagtacagataccttttcaagcaagtggcaagttcaacaggattttgtgaccagcgcaggctgggcctccttctgcatgattctatccaaattccaagacagttgggtgaagttgcatcctttgggggcagtaacattgagccaagtgtccggagctgcttccaatttgctaataataagccagagatcgaagcggccctcttcctagactggatgagactggaaccccagtccatggtgtggctgcccgtcctgcacagagtggctgctgcagaaactgccaagcatcaggccaaatgtaacatctgcaaagagtgtccaatcattggattcaggtacaggagtctaaagcactttaattatgacatctgccaaagctgctttttttctggtcgagttgcaaaaggccataaaatgcactatcccatggtggaatattgcactccgactacatcaggagaagatgttcgagactttgccaaggtactaaaaaacaaatttcgaaccaaaaggtattttgcgaagcatccccgaatgggctacctgccagtgcagactgtcttagagggggacaacatggaaactcccgttactctgatcaacttctggccagtagattctgcgcctgcctcgtcccctcagctttcacacgatgatactcattcacgcattgaacattatgctagcaggctagcagaaatggaaaacagcaatggatcttatctaaatgatagcatctctcctaatgagagcatagatgatgaacatttgttaatccagcattactgccaaagtttgaaccaggactcccccctgagccagcctcgtagtcctgcccagatcttgatttccttagagagtgaggaaagaggggagctagagagaatcctagcagatcttgaggaagaaaacaggaatctgcaagcagaatatgaccgtctaaagcagcagcacgaacataaaggcctgtccccactgccgtcccctcctgaaatgatgcccacctctccccagagtccccgggatgctgagctcattgctgaggccaagctactgcgtcaacacaaaggccgcctggaagccaggatgcaaatcctggaagaccacaataaacagctggagtcacagttacacaggctaaggcagctgctggagcaaccccaggcagaggccaaagtgaatggcacaacggtgtcctctccttctacctctctacagaggtccgacagcagtcagcctatgctgctccgagtggttggcagtcaaacttcggactccatgggtgaggaagatcttctcagtcctccccaggacacaagcacagggttagaggaggtgatggagcaactcaacaactccttccctagttcaagaggacacaatgtaggaagtcttttccacatggcagatgatttgggcagagcgatggagtccttagtatcagtcatgacagatgaagaaggagcagaataaatgttttacaactcctgattcccgcatggtttttataatattcatacaacaaagaggattagacagtaagagtttacaagaaataaatctatatttttgtgaagggtagtggtattatactgtagatttcagtagtttctaagtctgttattgttttgttaacaatggcaggttttacacgtctatgcaattgtacaaaaaagttataagaaaactacatgtaaaatcttgatagctaaataacttgccatttctttatatggaacgcattttgggttgtttaaaaatttataacagttataaagaaagattgtaaactaaagtgtgctttataaaaaaaagttgtttataaaaacccctaaaaacaaaacaaacacacacacacacacatacacacacacacacaaaactttgaggcagcgcattgttttgcatccttttggcgtgatatccatatgaaattcatggctttttctttttttgcatattaaagataagacttcctctaccaccacaccaaatgactactacacactgctcatttgagaactgtcagctgagtggggcaggcttgagttttcatttcatatatctatatgtctataagtatataaatactatagttatatagataaagagatacgaatttctatagactgactttttccattttttaaatgttcatgtcacatcctaatagaaagaaattacttctagtcagtcatccaggcttacctgcttggtctagaatggatttttcccggagccggaagccaggaggaaactacaccacactaaaacattgtctacagctccagatgtttctcattttaaacaactttccactgacaacgaaagtaaagtaaagtattggatttttttaaagggaacatgtgaatgaatacacaggacttattatatcagagtgagtaatcggttggttggttgattgattgattgattgatacattcagcttcctgctgctagcaatgccacgatttagatttaatgatgcttcagtggaaatcaatcagaaggtattctgaccttgtgaacatcagaaggtattttttaactcccaagcagtagcaggacgatgatagggctggagggctatggattcccagcccatccctgtgaaggagtaggccactctttaagtgaaggattggatgattgttcataatacataaagttctctgtaattacaactaaattattatgccctcttctcacagtcaaaaggaactgggtggtttggtttttgttgcttttttagatttattgtcccatgtgggatgagtttttaaatgccacaagacataatttaaaataaataaactttgggaaaaggtgtaaaacagtagccccatcacatttgtgatactgacaggtatcaacccagaagcccatgaactgtgtttccatcctttgcatttctctgcgagtagttccacacaggtttgtaagtaagtaagaaagaaggcaaattgattcaaatgttacaaaaaaacccttcttggtggattagacaggttaaatatataaacaaacaaacaaaaattgctcaaaaaagaggagaaaagctcaagaggaaaagctaaggactggtaggaaaaagctttactctttcatgccattttatttctttttgatttttaaatcattcattcaatagataccaccgtgtgacctataattttgcaaatctgttacctctgacatcaagtgtaattagcttttggagagtgggctgacatcaagtgtaattagcttttggagagtgggttttgtccattattaataattaattaattaacatcaaacacggcttctcatgctatttctacctcactttggttttggggtgttcctgataattgtgcacacctgagttcacagcttcaccacttgtccattgcgttattttctttttcctttataattctttctttttccttcataattttcaaaagaaaacccaaagctctaaggtaacaaattaccaaattacatgaagatttggtttttgtcttgcatttttttcctttatgtgacgctggaccttttctttacccaaggatttttaaaactcagatttaaaacaaggggttactttacatcctactaagaagtttaagtaagtaagtttcattctaaaatcagaggtaaatagagtgcataaataattttgttttaatctttttgtttttcttttagacacattagctctggagtgagtctgtcataatatttgaacaaaaattgagagctttattgctgcattttaagcataattaatttggacattatttcgtgttgtgttctttataaccaccaagtattaaactgtaaatcataatgtaactgaagcataaacatcacatggcatgttttgtcattgttttcaggtactgagttcttacttgagtatcataatatattgtgttttaacaccaacactgtaacatttacgaattatttttttaaacttcagttttactgcattttcacaacatatcagacttcaccaaatatatgccttactattgtattatagtactgctttactgtgtatctcaataaagcacgcagttatgttac

SEQ ID NO: 33 - protein, 635 aa, Homo sapiens
MREQLKGHETQTTCWDHPKMTELYQSLADLNNVRFSAYRTAMKLRRLQKALCLDLLSLSAACDALDQHNLKQNDQPMDILQIINCLTTIYDRLEQEHNNLVNVPLCVDMCLNWLLNVYDTGRTGRIRVLSFKTGIISLCKAHLEDKYRYLFKQVASSTGFCDQRRLGLLLHDSIQIPRQLGEVASFGGSNIEPSVRSCFQFANNKPEIEAALFLDWMRLEPQSMVWLPVLHRVAAAETAKHQAKCNICKECPIIGFRYRSLKHFNYDICQSCFFSGRVAKGHKMHYPMVEYCTPTTSGEDVRDFAKVLKNKFRTKRYFAKHPRMGYLPVQTVLEGDNMETPVTLINFWPVDSAPASSPQLSHDDTHSRIEHYASRLAEMENSNGSYLNDSISPNESIDDEHLLIQHYCQSLNQDSPLSQPRSPAQILISLESEERGELERILADLEEENRNLQAEYDRLKQQHEHKGLSPLPSPPEMMPTSPQSPRDAELIAEAKLLRQHKGRLEARMQILEDHNKQLESQLHRLRQLLEQPQAEAKVNGTTVSSPSTSLQRSDSSQPMLLRVVGSQTSDSMGEEDLLSPPQDTSTGLEEVMEQLNNSFPSSRGHNVGSLFHMADDLGRAMESLVSVMTDEEGAE

SEQ ID NO: 34 - DNA, 4584 bp, Homo sapiens
actttcggggagcccggcggctctgggaagctcactcctccactcgtacccacactcgaccgcggagcccttgcagccatgagggaacagctcaaaggccacgagactcaaacaacttgctgggaccatcccaaaatgacagagctctaccagtctttagctgacctgaataatgtcagattctcagcttataggactgccatgaaactccgaagactgcagaaggccctttgcttggatctcttgagcctgtcagctgcatgtgatgccttggaccagcacaacctcaagcaaaatgaccagcccatggatatcctgcagattattaattgtttgaccactatttatgaccgcctggagcaagagcacaacaatttggtcaacgtccctctctgcgtggatatgtgtctgaactggctgctgaatgtttatgatacgggacgaacagggaggatccgtgtcctgtcttttaaaactggcatcatttccctgtgtaaagcacatttggaagacaagtacagataccttttcaagcaagtggcaagttcaacaggattttgtgaccagcgcaggctgggcctccttctgcatgattctatccaaattccaagacagttgggtgaagttgcatcctttgggggcagtaacattgagccaagtgtccggagctgcttccaatttgctaataataagccagagatcgaagcggccctcttcctagactggatgagactggaaccccagtccatggtgtggctgcccgtcctgcacagagtggctgctgcagaaactgccaagcatcaggccaaatgtaacatctgcaaagagtgtccaatcattggattcaggtacaggagtctaaagcactttaattatgacatctgccaaagctgctttttttctggtcgagttgcaaaaggccataaaatgcactatcccatggtggaatattgcactccgactacatcaggagaagatgttcgagactttgccaaggtactaaaaaacaaatttcgaaccaaaaggtattttgcgaagcatccccgaatgggctacctgccagtgcagactgtcttagagggggacaacatggaaacgcctgcctcgtcccctcagctttcacacgatgatactcattcacgcattgaacattatgctagcaggctagcagaaatggaaaacagcaatggatcttatctaaatgatagcatctctcctaatgagagcatagatgatgaacatttgttaatccagcattactgccaaagtttgaaccaggactcccccctgagccagcctcgtagtcctgcccagatcttgatttccttagagagtgaggaaagaggggagctagagagaatcctagcagatcttgaggaagaaaacaggaatctgcaagcagaatatgaccgtctaaagcagcagcacgaacataaaggcctgtccccactgccgtcccctcctgaaatgatgcccacctctccccagagtccccgggatgctgagctcattgctgaggccaagctactgcgtcaacacaaaggccgcctggaagccaggatgcaaatcctggaagaccacaataaacagctggagtcacagttacacaggctaaggcagctgctggagcaaccccaggcagaggccaaagtgaatggcacaacggtgtcctctccttctacctctctacagaggtccgacagcagtcagcctatgctgctccgagtggttggcagtcaaacttcggactccatgggtgaggaagatcttctcagtcctccccaggacacaagcacagggttagaggaggtgatggagcaactcaacaactccttccctagttcaagaggaagaaatacccctggaaagccaatgagagaggacacaatgtaggaagtcttttccacatggcagatgatttgggcagagcgatggagtccttagtatcagtcatgacagatgaagaaggagcagaataaatgttttacaactcctgattcccgcatggtttttataatattcatacaacaaagaggattagacagtaagagtttacaagaaataaatctatatttttgtgaagggtagtggtattatactgtagatttcagtagtttctaagtctgttattgttttgttaacaatggcaggttttacacgtctatgcaattgtacaaaaaagttataagaaaactacatgtaaaatcttgatagctaaataacttgccatttctttatatggaacgcattttgggttgtttaaaaatttataacagttataaagaaagattgtaaactaaagtgtgctttataaaaaaaagttgtttataaaaacccctaaaaacaaaacaaacacacacacacacacatacacacacacacacaaaactttgaggcagcgcattgttttgcatccttttggcgtgatatccatatgaaattcatggctttttctttttttgcatattaaagataagacttcctctaccaccacaccaaatgactactacacactgctcatttgagaactgtcagctgagtggggcaggcttgagttttcatttcatatatctatatgtctataagtatataaatactatagttatatagataaagagatacgaatttctatagactgactttttccattttttaaatgttcatgtcacatcctaatagaaagaaattacttctagtcagtcatccaggcttacctgcttggtctagaatggatttttcccggagccggaagccaggaggaaactacaccacactaaaacattgtctacagctccagatgtttctcattttaaacaactttccactgacaacgaaagtaaagtaaagtattggatttttttaaagggaacatgtgaatgaatacacaggacttattatatcagagtgagtaatcggttggttggttgattgattgattgattgatacattcagcttcctgctgctagcaatgccacgatttagatttaatgatgcttcagtggaaatcaatcagaaggtattctgaccttgtgaacatcagaaggtattttttaactcccaagcagtagcaggacgatgatagggctggagggctatggattcccagcccatccctgtgaaggagtaggccactctttaagtgaaggattggatgattgttcataatacataaagttctctgtaattacaactaaattattatgccctcttctcacagtcaaaaggaactgggtggtttggtttttgttgcttttttagatttattgtcccatgtgggatgagtttttaaatgccacaagacataatttaaaataaataaactttgggaaaaggtgtaaaacagtagccccatcacatttgtgatactgacaggtatcaacccagaagcccatgaactgtgtttccatcctttgcatttctctgcgagtagttccacacaggtttgtaagtaagtaagaaagaaggcaaattgattcaaatgttacaaaaaaacccttcttggtggattagacaggttaaatatataaacaaacaaacaaaaattgctcaaaaaagaggagaaaagctcaagaggaaaagctaaggactggtaggaaaaagctttactctttcatgccattttatttctttttgatttttaaatcattcattcaatagataccaccgtgtgacctataattttgcaaatctgttacctctgacatcaagtgtaattagcttttggagagtgggctgacatcaagtgtaattagcttttggagagtgggttttgtccattattaataattaattaattaacatcaaacacggcttctcatgctatttctacctcactttggttttggggtgttcctgataattgtgcacacctgagttcacagcttcaccacttgtccattgcgttattttctttttcctttataattctttctttttccttcataattttcaaaagaaaacccaaagctctaaggtaacaaattaccaaattacatgaagatttggtttttgtcttgcatttttttcctttatgtgacgctggaccttttctttacccaaggatttttaaaactcagatttaaaacaaggggttactttacatcctactaagaagtttaagtaagtaagtttcattctaaaatcagaggtaaatagagtgcataaataattttgttttaatctttttgtttttcttttagacacattagctctggagtgagtctgtcataatatttgaacaaaaattgagagctttattgctgcattttaagcataattaatttggacattatttcgtgttgtgttctttataaccaccaagtattaaactgtaaatcataatgtaactgaagcataaacatcacatggcatgttttgtcattgttttcaggtactgagttcttacttgagtatcataatatattgtgttttaacaccaacactgtaacatttacgaattatttttttaaacttcagttttactgcattttcacaacatatcagacttcaccaaatatatgccttactattgtattatagtactgctttactgtgtatctcaataaagcacgcagttatgttac

SEQ ID NO: 35 - protein, 604 aa, Homo sapiens
MREQLKGHETQTTCWDHPKMTELYQSLADLNNVRFSAYRTAMKLRRLQKALCLDLLSLSAACDALDQHNLKQNDQPMDILQIINCLTTIYDRLEQEHNNLVNVPLCVDMCLNWLLNVYDTGRTGRIRVLSFKTGIISLCKAHLEDKYRYLFKQVASSTGFCDQRRLGLLLHDSIQIPRQLGEVASFGGSNIEPSVRSCFQFANNKPEIEAALFLDWMRLEPQSMVWLPVLHRVAAAETAKHQAKCNICKECPIIGFRYRSLKHFNYDICQSCFFSGRVAKGHKMHYPMVEYCTPTTSGEDVRDFAKVLKNKFRTKRYFAKHPRMGYLPVQTVLEGDNMETPASSPQLSHDDTHSRIEHYASRLAEMENSNGSYLNDSISPNESIDDEHLLIQHYCQSLNQDSPLSQPRSPAQILISLESEERGELERILADLEEENRNLQAEYDRLKQQHEHKGLSPLPSPPEMMPTSPQSPRDAELIAEAKLLRQHKGRLEARMQILEDHNKQLESQLHRLRQLLEQPQAEAKVNGTTVSSPSTSLQRSDSSQPMLLRVVGSQTSDSMGEEDLLSPPQDTSTGLEEVMEQLNNSFPSSRGRNTPGKPMREDTM

SEQ ID NO: 36 - DNA, 4552 bp, Homo sapiens
actttcggggagcccggcggctctgggaagctcactcctccactcgtacccacactcgaccgcggagcccttgcagccatgagggaacagctcaaaggccacgagactcaaacaacttgctgggaccatcccaaaatgacagagctctaccagtctttagctgacctgaataatgtcagattctcagcttataggactgccatgaaactccgaagactgcagaaggccctttgcttggatctcttgagcctgtcagctgcatgtgatgccttggaccagcacaacctcaagcaaaatgaccagcccatggatatcctgcagattattaattgtttgaccactatttatgaccgcctggagcaagagcacaacaatttggtcaacgtccctctctgcgtggatatgtgtctgaactggctgctgaatgtttatgatacgggacgaacagggaggatccgtgtcctgtcttttaaaactggcatcatttccctgtgtaaagcacatttggaagacaagtacagataccttttcaagcaagtggcaagttcaacaggattttgtgaccagcgcaggctgggcctccttctgcatgattctatccaaattccaagacagttgggtgaagttgcatcctttgggggcagtaacattgagccaagtgtccggagctgcttccaatttgctaataataagccagagatcgaagcggccctcttcctagactggatgagactggaaccccagtccatggtgtggctgcccgtcctgcacagagtggctgctgcagaaactgccaagcatcaggccaaatgtaacatctgcaaagagtgtccaatcattggattcaggtacaggagtctaaagcactttaattatgacatctgccaaagctgctttttttctggtcgagttgcaaaaggccataaaatgcactatcccatggtggaatattgcactccgactacatcaggagaagatgttcgagactttgccaaggtactaaaaaacaaatttcgaaccaaaaggtattttgcgaagcatccccgaatgggctacctgccagtgcagactgtcttagagggggacaacatggaaacgcctgcctcgtcccctcagctttcacacgatgatactcattcacgcattgaacattatgctagcaggctagcagaaatggaaaacagcaatggatcttatctaaatgatagcatctctcctaatgagagcatagatgatgaacatttgttaatccagcattactgccaaagtttgaaccaggactcccccctgagccagcctcgtagtcctgcccagatcttgatttccttagagagtgaggaaagaggggagctagagagaatcctagcagatcttgaggaagaaaacaggaatctgcaagcagaatatgaccgtctaaagcagcagcacgaacataaaggcctgtccccactgccgtcccctcctgaaatgatgcccacctctccccagagtccccgggatgctgagctcattgctgaggccaagctactgcgtcaacacaaaggccgcctggaagccaggatgcaaatcctggaagaccacaataaacagctggagtcacagttacacaggctaaggcagctgctggagcaaccccaggcagaggccaaagtgaatggcacaacggtgtcctctccttctacctctctacagaggtccgacagcagtcagcctatgctgctccgagtggttggcagtcaaacttcggactccatgggtgaggaagatcttctcagtcctccccaggacacaagcacagggttagaggaggtgatggagcaactcaacaactccttccctagttcaagaggacacaatgtaggaagtcttttccacatggcagatgatttgggcagagcgatggagtccttagtatcagtcatgacagatgaagaaggagcagaataaatgttttacaactcctgattcccgcatggtttttataatattcatacaacaaagaggattagacagtaagagtttacaagaaataaatctatatttttgtgaagggtagtggtattatactgtagatttcagtagtttctaagtctgttattgttttgttaacaatggcaggttttacacgtctatgcaattgtacaaaaaagttataagaaaactacatgtaaaatcttgatagctaaataacttgccatttctttatatggaacgcattttgggttgtttaaaaatttataacagttataaagaaagattgtaaactaaagtgtgctttataaaaaaaagttgtttataaaaacccctaaaaacaaaacaaacacacacacacacacatacacacacacacacaaaactttgaggcagcgcattgttttgcatccttttggcgtgatatccatatgaaattcatggctttttctttttttgcatattaaagataagacttcctctaccaccacaccaaatgactactacacactgctcatttgagaactgtcagctgagtggggcaggcttgagttttcatttcatatatctatatgtctataagtatataaatactatagttatatagataaagagatacgaatttctatagactgactttttccattttttaaatgttcatgtcacatcctaatagaaagaaattacttctagtcagtcatccaggcttacctgcttggtctagaatggatttttcccggagccggaagccaggaggaaactacaccacactaaaacattgtctacagctccagatgtttctcattttaaacaactttccactgacaacgaaagtaaagtaaagtattggatttttttaaagggaacatgtgaatgaatacacaggacttattatatcagagtgagtaatcggttggttggttgattgattgattgattgatacattcagcttcctgctgctagcaatgccacgatttagatttaatgatgcttcagtggaaatcaatcagaaggtattctgaccttgtgaacatcagaaggtattttttaactcccaagcagtagcaggacgatgatagggctggagggctatggattcccagcccatccctgtgaaggagtaggccactctttaagtgaaggattggatgattgttcataatacataaagttctctgtaattacaactaaattattatgccctcttctcacagtcaaaaggaactgggtggtttggtttttgttgcttttttagatttattgtcccatgtgggatgagtttttaaatgccacaagacataatttaaaataaataaactttgggaaaaggtgtaaaacagtagccccatcacatttgtgatactgacaggtatcaacccagaagcccatgaactgtgtttccatcctttgcatttctctgcgagtagttccacacaggtttgtaagtaagtaagaaagaaggcaaattgattcaaatgttacaaaaaaacccttcttggtggattagacaggttaaatatataaacaaacaaacaaaaattgctcaaaaaagaggagaaaagctcaagaggaaaagctaaggactggtaggaaaaagctttactctttcatgccattttatttctttttgatttttaaatcattcattcaatagataccaccgtgtgacctataattttgcaaatctgttacctctgacatcaagtgtaattagcttttggagagtgggctgacatcaagtgtaattagcttttggagagtgggttttgtccattattaataattaattaattaacatcaaacacggcttctcatgctatttctacctcactttggttttggggtgttcctgataattgtgcacacctgagttcacagcttcaccacttgtccattgcgttattttctttttcctttataattctttctttttccttcataattttcaaaagaaaacccaaagctctaaggtaacaaattaccaaattacatgaagatttggtttttgtcttgcatttttttcctttatgtgacgctggaccttttctttacccaaggatttttaaaactcagatttaaaacaaggggttactttacatcctactaagaagtttaagtaagtaagtttcattctaaaatcagaggtaaatagagtgcataaataattttgttttaatctttttgtttttcttttagacacattagctctggagtgagtctgtcataatatttgaacaaaaattgagagctttattgctgcattttaagcataattaatttggacattatttcgtgttgtgttctttataaccaccaagtattaaactgtaaatcataatgtaactgaagcataaacatcacatggcatgttttgtcattgttttcaggtactgagttcttacttgagtatcataatatattgtgttttaacaccaacactgtaacatttacgaattatttttttaaacttcagttttactgcattttcacaacatatcagacttcaccaaatatatgccttactattgtattatagtactgctttactgtgtatctcaataaagcacgcagttatgttac

SEQ ID NO: 37 - protein, 622 aa, Homo sapiens
MREQLKGHETQTTCWDHPKMTELYQSLADLNNVRFSAYRTAMKLRRLQKALCLDLLSLSAACDALDQHNLKQNDQPMDILQIINCLTTIYDRLEQEHNNLVNVPLCVDMCLNWLLNVYDTGRTGRIRVLSFKTGIISLCKAHLEDKYRYLFKQVASSTGFCDQRRLGLLLHDSIQIPRQLGEVASFGGSNIEPSVRSCFQFANNKPEIEAALFLDWMRLEPQSMVWLPVLHRVAAAETAKHQAKCNICKECPIIGFRYRSLKHFNYDICQSCFFSGRVAKGHKMHYPMVEYCTPTTSGEDVRDFAKVLKNKFRTKRYFAKHPRMGYLPVQTVLEGDNMETPASSPQLSHDDTHSRIEHYASRLAEMENSNGSYLNDSISPNESIDDEHLLIQHYCQSLNQDSPLSQPRSPAQILISLESEERGELERILADLEEENRNLQAEYDRLKQQHEHKGLSPLPSPPEMMPTSPQSPRDAELIAEAKLLRQHKGRLEARMQILEDHNKQLESQLHRLRQLLEQPQAEAKVNGTTVSSPSTSLQRSDSSQPMLLRVVGSQTSDSMGEEDLLSPPQDTSTGLEEVMEQLNNSFPSSRGHNVGSLFHMADDLGRAMESLVSVMTDEEGAE

SEQ ID NO: 38 - DNA, 1571 bp, Homo sapiens
actttcggggagcccggcggctctgggaagctcactcctccactcgtacccacactcgaccgcggagcccttgcagccatgagggaacagctcaaaggccacgagactcaaacaacttgctgggaccatcccaaaatgacagagctctaccagtctttagctgacctgaataatgtcagattctcagcttataggactgccatgaaactccgaagactgcagaaggccctttgcttggatctcttgagcctgtcagctgcatgtgatgccttggaccagcacaacctcaagcaaaatgaccagcccatggatatcctgcagattattaattgtttgaccactatttatgaccgcctggagcaagagcacaacaatttggtcaacgtccctctctgcgtggatatgtgtctgaactggctgctgaatgtttatgatacgggacgaacagggaggatccgtgtcctgtcttttaaaactggcatcatttccctgtgtaaagcacatttggaagacaagtacagataccttttcaagcaagtggcaagttcaacaggattttgtgaccagcgcaggctgggcctccttctgcatgattctatccaaattccaagacagttgggtgaagttgcatcctttgggggcagtaacattgagccaagtgtccggagctgcttccaatttgctaataataagccagagatcgaagcggccctcttcctagactggatgagactggaaccccagtccatggtgtggctgcccgtcctgcacagagtggctgctgcagaaactgccaagcatcaggccaaatgtaacatctgcaaagagtgtccaatcattggattcaggtacaggagtctaaagcactttaattatgacatctgccaaagctgctttttttctggtcgagttgcaaaaggccataaaatgcactatcccatggtggaatattgcactccgactacatcaggagaagatgttcgagactttgccaaggtactaaaaaacaaatttcgaaccaaaaggtattttgcgaagcatccccgaatgggctacctgccagtgcagactgtcttagagggggacaacatggaaacgtgagtagtagcaaaagcagaacacactcttgtttgatgtatatttgaactcctctcagctgaacaccctccttcactcccaaatgcaaacagtctcttctatttctttctttttatttacattagctgaaaagagaaaaataagctgatgtccagttgccactttcccacgtcacttgacaatttctttttccaaaagttaaactttatctcacagggggaaaaaaaaaaaaaaaccacaacacaatacagccactaattgccttacaagccttataagaaatatgggactgtttacaaatgagtgattccagtatttcattttgattttcctctctcacaaatcagtaaatgtgtgtctttttgtatctcattgtgtggtcatatctagtcacttgtttctactcaaaagaaaatatagtcacaggaaactacttcacagtaagtagtaatgattctcaagatcaaagggga

SEQ ID NO: 39 - protein, 340 aa, Homo sapiens
MREQLKGHETQTTCWDHPKMTELYQSLADLNNVRFSAYRTAMKLRRLQKALCLDLLSLSAACDALDQHNLKQNDQPMDILQIINCLTTIYDRLEQEHNNLVNVPLCVDMCLNWLLNVYDTGRTGRIRVLSFKTGIISLCKAHLEDKYRYLFKQVASSTGFCDQRRLGLLLHDSIQIPRQLGEVASFGGSNIEPSVRSCFQFANNKPEIEAALFLDWMRLEPQSMVWLPVLHRVAAAETAKHQAKCNICKECPIIGFRYRSLKHFNYDICQSCFFSGRVAKGHKMHYPMVEYCTPTTSGEDVRDFAKVLKNKFRTKRYFAKHPRMGYLPVQTVLEGDNMET

SEQ ID NO: 40 - DNA, 7080 bp, Homo sapiens
acactagcaatggcaaagctttgtgcggaggcattgctggctgctctgaactaaaagcatccgtggggaccgaaagaggtttttgcacaccttattaaggaactccaggatggcattgggcagcggcaaactgttgtcagaacattgaatgcaactggggaagaaataattcagcaatcctcaaaaacagatgccagtattctacaggaaaaattgggaagcctgaatctgcggtggcaggaggtctgcaaacagctgtcagacagaaaaaagaggctagaagaacaaaagaatatcttgtcagaatttcaaagagatttaaatgaatttgttttatggttggaggaagcagataacattgctagtatcccacttgaacctggaaaagagcagcaactaaaagaaaagcttgagcaagtcaagttactggtggaagagttgcccctgcgccagggaattctcaaacaattaaatgaaactggaggacccgtgcttgtaagtgctcccataagcccagaagagcaagataaacttgaaaataagctcaagcagacaaatctccagtggataaaggtttccagagctttacctgagaaacaaggagaaattgaagctcaaataaaagaccttgggcagcttgaaaaaaagcttgaagaccttgaagagcagttaaatcatctgctgctgtggttatctcctattaggaatcagttggaaatttataaccaaccaaaccaagaaggaccatttgacgttcaggaaactgaaatagcagttcaagctaaacaaccggatgtggaagagattttgtctaaagggcagcatttgtacaaggaaaaaccagccactcagccagtgaagaggaagttagaagatctgagctctgagtggaaggcggtaaaccgtttacttcaagagctgagggcaaagcagcctgacctagctcctggactgaccactattggagcctctcctactcagactgttactctggtgacacaacctgtggttactaaggaaactgccatctccaaactagaaatgccatcttccttgatgttggaggtacctgctctggcagatttcaaccgggcttggacagaacttaccgactggctttctctgcttgatcaagttataaaatcacagagggtgatggtgggtgaccttgaggatatcaacgagatgatcatcaagcagaaggcaacaatgcaggatttggaacagaggcgtccccagttggaagaactcattaccgctgcccaaaatttgaaaaacaagaccagcaatcaagaggctagaacaatcattacggatcgaattgaaagaattcagaatcagtgggatgaagtacaagaacaccttcagaaccggaggcaacagttgaatgaaatgttaaaggattcaacacaatggctggaagctaaggaagaagctgagcaggtcttaggacaggccagagccaagcttgagtcatggaaggagggtccctatacagtagatgcaatccaaaagaaaatcacagaaaccaagcagttggccaaagacctccgccagtggcagacaaatgtagatgtggcaaatgacttggccctgaaacttctccgggattattctgcagatgataccagaaaagtccacatgataacagagaatatcaatgcctcttggagaagcattcataaaagggtgagtgagcgagaggctgctttggaagaaactcatagattactgcaacagttccccctggacctggaaaagtttcttgcctggcttacagaagctgaaacaactgccaatgtcctacaggatgctacccgtaaggaaaggctcctagaagactccaagggagtaaaagagctgatgaaacaatggcaagacctccaaggtgaaattgaagctcacacagatgtttatcacaacctggatgaaaacagccaaaaaatcctgagatccctggaaggttccgatgatgcagtcctgttacaaagacgtttggataacatgaacttcaagtggagtgaacttcggaaaaagtctctcaacattaggtcccatttggaagccagttctgaccagtggaagcgtctgcacctttctctgcaggaacttctggtgtggctacagctgaaagatgatgaattaagccggcaggcacctattggaggcgactttccagcagttcagaagcagaacgatgtacatagggccttcaagagggaattgaaaactaaagaacctgtaatcatgagtactcttgagactgtacgaatatttctgacagagcagcctttggaaggactagagaaactctaccaggagcccagagagctgcctcctgaggagagagcccagaatgtcactcggcttctacgaaagcaggctgaggaggtcaatactgagtgggaaaaattgaacctgcactccgctgactggcagagaaaaatagatgagacccttgaaagactccaggaacttcaagaggccacggatgagctggacctcaagctgcgccaagctgaggtgatcaagggatcctggcagcccgtgggcgatctcctcattgactctctccaagatcacctcgagaaagtcaaggcacttcgaggagaaattgcgcctctgaaagagaacgtgagccacgtcaatgaccttgctcgccagcttaccactttgggcattcagctctcaccgtataacctcagcactctggaagacctgaacaccagatggaagcttctgcaggtggccgtcgaggaccgagtcaggcagctgcatgaagcccacagggactttggtccagcatctcagcactttctttccacgtctgtccagggtccctgggagagagccatctcgccaaacaaagtgccctactatatcaaccacgagactcaaacaacttgctgggaccatcccaaaatgacagagctctaccagtctttagctgacctgaataatgtcagattctcagcttataggactgccatgaaactccgaagactgcagaaggccctttgcttggatctcttgagcctgtcagctgcatgtgatgccttggaccagcacaacctcaagcaaaatgaccagcccatggatatcctgcagattattaattgtttgaccactatttatgaccgcctggagcaagagcacaacaatttggtcaacgtccctctctgcgtggatatgtgtctgaactggctgctgaatgtttatgatacgggacgaacagggaggatccgtgtcctgtcttttaaaactggcatcatttccctgtgtaaagcacatttggaagacaagtacagataccttttcaagcaagtggcaagttcaacaggattttgtgaccagcgcaggctgggcctccttctgcatgattctatccaaattccaagacagttgggtgaagttgcatcctttgggggcagtaacattgagccaagtgtccggagctgcttccaatttgctaataataagccagagatcgaagcggccctcttcctagactggatgagactggaaccccagtccatggtgtggctgcccgtcctgcacagagtggctgctgcagaaactgccaagcatcaggccaaatgtaacatctgcaaagagtgtccaatcattggattcaggtacaggagtctaaagcactttaattatgacatctgccaaagctgctttttttctggtcgagttgcaaaaggccataaaatgcactatcccatggtggaatattgcactccgactacatcaggagaagatgttcgagactttgccaaggtactaaaaaacaaatttcgaaccaaaaggtattttgcgaagcatccccgaatgggctacctgccagtgcagactgtcttagagggggacaacatggaaacgaatctgcaagcagaatatgaccgtctaaagcagcagcacgaacataaaggcctgtccccactgccgtcccctcctgaaatgatgcccacctctccccagagtccccgggatgctgagctcattgctgaggccaagctactgcgtcaacacaaaggccgcctggaagccaggatgcaaatcctggaagaccacaataaacagctggagtcacagttacacaggctaaggcagctgctggagcaaccccaggcagaggccaaagtgaatggcacaacggtgtcctctccttctacctctctacagaggtccgacagcagtcagcctatgctgctccgagtggttggcagtcaaacttcggactccatgggtgaggaagatcttctcagtcctccccaggacacaagcacagggttagaggaggtgatggagcaactcaacaactccttccctagttcaagaggaagaaatacccctggaaagccaatgagagaggacacaatgtaggaagtcttttccacatggcagatgatttgggcagagcgatggagtccttagtatcagtcatgacagatgaagaaggagcagaataaatgttttacaactcctgattcccgcatggtttttataatattcatacaacaaagaggattagacagtaagagtttacaagaaataaatctatatttttgtgaagggtagtggtattatactgtagatttcagtagtttctaagtctgttattgttttgttaacaatggcaggttttacacgtctatgcaattgtacaaaaaagttataagaaaactacatgtaaaatcttgatagctaaataacttgccatttctttatatggaacgcattttgggttgtttaaaaatttataacagttataaagaaagattgtaaactaaagtgtgctttataaaaaaaagttgtttataaaaacccctaaaaacaaaacaaacacacacacacacacatacacacacacacacaaaactttgaggcagcgcattgttttgcatccttttggcgtgatatccatatgaaattcatggctttttctttttttgcatattaaagataagacttcctctaccaccacaccaaatgactactacacactgctcatttgagaactgtcagctgagtggggcaggcttgagttttcatttcatatatctatatgtctataagtatataaatactatagttatatagataaagagatacgaatttctatagactgactttttccattttttaaatgttcatgtcacatcctaatagaaagaaattacttctagtcagtcatccaggcttacctgcttggtctagaatggatttttcccggagccggaagccaggaggaaactacaccacactaaaacattgtctacagctccagatgtttctcattttaaacaactttccactgacaacgaaagtaaagtaaagtattggatttttttaaagggaacatgtgaatgaatacacaggacttattatatcagagtgagtaatcggttggttggttgattgattgattgattgatacattcagcttcctgctgctagcaatgccacgatttagatttaatgatgcttcagtggaaatcaatcagaaggtattctgaccttgtgaacatcagaaggtattttttaactcccaagcagtagcaggacgatgatagggctggagggctatggattcccagcccatccctgtgaaggagtaggccactctttaagtgaaggattggatgattgttcataatacataaagttctctgtaattacaactaaattattatgccctcttctcacagtcaaaaggaactgggtggtttggtttttgttgcttttttagatttattgtcccatgtgggatgagtttttaaatgccacaagacataatttaaaataaataaactttgggaaaaggtgtaaaacagtagccccatcacatttgtgatactgacaggtatcaacccagaagcccatgaactgtgtttccatcctttgcatttctctgcgagtagttccacacaggtttgtaagtaagtaagaaagaaggcaaattgattcaaatgttacaaaaaaacccttcttggtggattagacaggttaaatatataaacaaacaaacaaaaattgctcaaaaaagaggagaaaagctcaagaggaaaagctaaggactggtaggaaaaagctttactctttcatgccattttatttctttttgatttttaaatcattcattcaatagataccaccgtgtgacctataattttgcaaatctgttacctctgacatcaagtgtaattagcttttggagagtgggctgacatcaagtgtaattagcttttggagagtgggttttgtccattattaataattaattaattaacatcaaacacggcttctcatgctatttctacctcactttggttttggggtgttcctgataattgtgcacacctgagttcacagcttcaccacttgtccattgcgttattttctttttcctttataattctttctttttccttcataattttcaaaagaaaacccaaagctctaaggtaacaaattaccaaattacatgaagatttggtttttgtcttgcatttttttcctttatgtgacgctggaccttttctttacccaaggatttttaaaactcagatttaaaacaaggggttactttacatcctactaagaagtttaagtaagtaagtttcattctaaaatcagaggtaaatagagtgcataaataattttgttttaatctttttgtttttcttttagacacattagctctggagtgagtctgtcataatatttgaacaaaaattgagagctttattgctgcattttaagcataattaatttggacattatttcgtgttgtgttctttataaccaccaagtattaaactgtaaatcataatgtaactgaagcataaacatcacatggcatgttttgtcattgttttcaggtactgagttcttacttgagtatcataatatattgtgttttaacaccaacactgtaacatttacgaattatttttttaaacttcagttttactgcattttcacaacatatcagacttcaccaaatatatgccttactattgtattatagtactgctttactgtgtatctcaataaagcacgcagttatgttac

SEQ ID NO: 41 - protein, 1115 aa, Homo sapiens
MPSSLMLEVPALADFNRAWTELTDWLSLLDQVIKSQRVMVGDLEDINEMIIKQKATMQDLEQRRPQLEELITAAQNLKNKTSNQEARTIITDRIERIQNQWDEVQEHLQNRRQQLNEMLKDSTQWLEAKEEAEQVLGQARAKLESWKEGPYTVDAIQKKITETKQLAKDLRQWQTNVDVANDLALKLLRDYSADDTRKVHMITENINASWRSIHKRVSEREAALEETHRLLQQFPLDLEKFLAWLTEAETTANVLQDATRKERLLEDSKGVKELMKQWQDLQGEIEAHTDVYHNLDENSQKILRSLEGSDDAVLLQRRLDNMNFKWSELRKKSLNIRSHLEASSDQWKRLHLSLQELLVWLQLKDDELSRQAPIGGDFPAVQKQNDVHRAFKRELKTKEPVIMSTLETVRIFLTEQPLEGLEKLYQEPRELPPEERAQNVTRLLRKQAEEVNTEWEKLNLHSADWQRKIDETLERLQELQEATDELDLKLRQAEVIKGSWQPVGDLLIDSLQDHLEKVKALRGEIAPLKENVSHVNDLARQLTTLGIQLSPYNLSTLEDLNTRWKLLQVAVEDRVRQLHEAHRDFGPASQHFLSTSVQGPWERAISPNKVPYYINHETQTTCWDHPKMTELYQSLADLNNVRFSAYRTAMKLRRLQKALCLDLLSLSAACDALDQHNLKQNDQPMDILQIINCLTTIYDRLEQEHNNLVNVPLCVDMCLNWLLNVYDTGRTGRIRVLSFKTGIISLCKAHLEDKYRYLFKQVASSTGFCDQRRLGLLLHDSIQIPRQLGEVASFGGSNIEPSVRSCFQFANNKPEIEAALFLDWMRLEPQSMVWLPVLHRVAAAETAKHQAKCNICKECPIIGFRYRSLKHFNYDICQSCFFSGRVAKGHKMHYPMVEYCTPTTSGEDVRDFAKVLKNKFRTKRYFAKHPRMGYLPVQTVLEGDNMETNLQAEYDRLKQQHEHKGLSPLPSPPEMMPTSPQSPRDAELIAEAKLLRQHKGRLEARMQILEDHNKQLESQLHRLRQLLEQPQAEAKVNGTTVSSPSTSLQRSDSSQPMLLRVVGSQTSDSMGEEDLLSPPQDTSTGLEEVMEQLNNSFPSSRGRNTPGKPMREDTM

SEQ ID NO: 42 - DNA, 7378 bp, Homo sapiens
acactagcaatggcaaagctttgtgcggaggcattgctggctgctctgaactaaaagcatccgtggggaccgaaagaggtttttgcacaccttattaaggaactccaggatggcattgggcagcggcaaactgttgtcagaacattgaatgcaactggggaagaaataattcagcaatcctcaaaaacagatgccagtattctacaggaaaaattgggaagcctgaatctgcggtggcaggaggtctgcaaacagctgtcagacagaaaaaagaggctagaagaacaaaagaatatcttgtcagaatttcaaagagatttaaatgaatttgttttatggttggaggaagcagataacattgctagtatcccacttgaacctggaaaagagcagcaactaaaagaaaagcttgagcaagtcaagttactggtggaagagttgcccctgcgccagggaattctcaaacaattaaatgaaactggaggacccgtgcttgtaagtgctcccataagcccagaagagcaagataaacttgaaaataagctcaagcagacaaatctccagtggataaaggtttccagagctttacctgagaaacaaggagaaattgaagctcaaataaaagaccttgggcagcttgaaaaaaagcttgaagaccttgaagagcagttaaatcatctgctgctgtggttatctcctattaggaatcagttggaaatttataaccaaccaaaccaagaaggaccatttgacgttcaggaaactgaaatagcagttcaagctaaacaaccggatgtggaagagattttgtctaaagggcagcatttgtacaaggaaaaaccagccactcagccagtgaagaggaagttagaagatctgagctctgagtggaaggcggtaaaccgtttacttcaagagctgagggcaaagcagcctgacctagctcctggactgaccactattggagcctctcctactcagactgttactctggtgacacaacctgtggttactaaggaaactgccatctccaaactagaaatgccatcttccttgatgttggaggtacctgctctggcagatttcaaccgggcttggacagaacttaccgactggctttctctgcttgatcaagttataaaatcacagagggtgatggtgggtgaccttgaggatatcaacgagatgatcatcaagcagaaggcaacaatgcaggatttggaacagaggcgtccccagttggaagaactcattaccgctgcccaaaatttgaaaaacaagaccagcaatcaagaggctagaacaatcattacggatcgaattgaaagaattcagaatcagtgggatgaagtacaagaacaccttcagaaccggaggcaacagttgaatgaaatgttaaaggattcaacacaatggctggaagctaaggaagaagctgagcaggtcttaggacaggccagagccaagcttgagtcatggaaggagggtccctatacagtagatgcaatccaaaagaaaatcacagaaaccaagcagttggccaaagacctccgccagtggcagacaaatgtagatgtggcaaatgacttggccctgaaacttctccgggattattctgcagatgataccagaaaagtccacatgataacagagaatatcaatgcctcttggagaagcattcataaaagggtgagtgagcgagaggctgctttggaagaaactcatagattactgcaacagttccccctggacctggaaaagtttcttgcctggcttacagaagctgaaacaactgccaatgtcctacaggatgctacccgtaaggaaaggctcctagaagactccaagggagtaaaagagctgatgaaacaatggcaagacctccaaggtgaaattgaagctcacacagatgtttatcacaacctggatgaaaacagccaaaaaatcctgagatccctggaaggttccgatgatgcagtcctgttacaaagacgtttggataacatgaacttcaagtggagtgaacttcggaaaaagtctctcaacattaggtcccatttggaagccagttctgaccagtggaagcgtctgcacctttctctgcaggaacttctggtgtggctacagctgaaagatgatgaattaagccggcaggcacctattggaggcgactttccagcagttcagaagcagaacgatgtacatagggccttcaagagggaattgaaaactaaagaacctgtaatcatgagtactcttgagactgtacgaatatttctgacagagcagcctttggaaggactagagaaactctaccaggagcccagagagctgcctcctgaggagagagcccagaatgtcactcggcttctacgaaagcaggctgaggaggtcaatactgagtgggaaaaattgaacctgcactccgctgactggcagagaaaaatagatgagacccttgaaagactccaggaacttcaagaggccacggatgagctggacctcaagctgcgccaagctgaggtgatcaagggatcctggcagcccgtgggcgatctcctcattgactctctccaagatcacctcgagaaagtcaaggcacttcgaggagaaattgcgcctctgaaagagaacgtgagccacgtcaatgaccttgctcgccagcttaccactttgggcattcagctctcaccgtataacctcagcactctggaagacctgaacaccagatggaagcttctgcaggtggccgtcgaggaccgagtcaggcagctgcatgaagcccacagggactttggtccagcatctcagcactttctttccacgtctgtccagggtccctgggagagagccatctcgccaaacaaagtgccctactatatcaaccacgagactcaaacaacttgctgggaccatcccaaaatgacagagctctaccagtctttagctgacctgaataatgtcagattctcagcttataggactgccatgaaactccgaagactgcagaaggccctttgcttggatctcttgagcctgtcagctgcatgtgatgccttggaccagcacaacctcaagcaaaatgaccagcccatggatatcctgcagattattaattgtttgaccactatttatgaccgcctggagcaagagcacaacaatttggtcaacgtccctctctgcgtggatatgtgtctgaactggctgctgaatgtttatgatacgggacgaacagggaggatccgtgtcctgtcttttaaaactggcatcatttccctgtgtaaagcacatttggaagacaagtacagataccttttcaagcaagtggcaagttcaacaggattttgtgaccagcgcaggctgggcctccttctgcatgattctatccaaattccaagacagttgggtgaagttgcatcctttgggggcagtaacattgagccaagtgtccggagctgcttccaatttgctaataataagccagagatcgaagcggccctcttcctagactggatgagactggaaccccagtccatggtgtggctgcccgtcctgcacagagtggctgctgcagaaactgccaagcatcaggccaaatgtaacatctgcaaagagtgtccaatcattggattcaggtacaggagtctaaagcactttaattatgacatctgccaaagctgctttttttctggtcgagttgcaaaaggccataaaatgcactatcccatggtggaatattgcactccgactacatcaggagaagatgttcgagactttgccaaggtactaaaaaacaaatttcgaaccaaaaggtattttgcgaagcatccccgaatgggctacctgccagtgcagactgtcttagagggggacaacatggaaactcccgttactctgatcaacttctggccagtagattctgcgcctgcctcgtcccctcagctttcacacgatgatactcattcacgcattgaacattatgctagcaggctagcagaaatggaaaacagcaatggatcttatctaaatgatagcatctctcctaatgagagcatagatgatgaacatttgttaatccagcattactgccaaagtttgaaccaggactcccccctgagccagcctcgtagtcctgcccagatcttgatttccttagagagtgaggaaagaggggagctagagagaatcctagcagatcttgaggaagaaaacaggaatctgcaagcagaatatgaccgtctaaagcagcagcacgaacataaaggcctgtccccactgccgtcccctcctgaaatgatgcccacctctccccagagtccccgggatgctgagctcattgctgaggccaagctactgcgtcaacacaaaggccgcctggaagccaggatgcaaatcctggaagaccacaataaacagctggagtcacagttacacaggctaaggcagctgctggagcaaccccaggcagaggccaaagtgaatggcacaacggtgtcctctccttctacctctctacagaggtccgacagcagtcagcctatgctgctccgagtggttggcagtcaaacttcggactccatgggtgaggaagatcttctcagtcctccccaggacacaagcacagggttagaggaggtgatggagcaactcaacaactccttccctagttcaagaggacacaatgtaggaagtcttttccacatggcagatgatttgggcagagcgatggagtccttagtatcagtcatgacagatgaagaaggagcagaataaatgttttacaactcctgattcccgcatggtttttataatattcatacaacaaagaggattagacagtaagagtttacaagaaataaatctatatttttgtgaagggtagtggtattatactgtagatttcagtagtttctaagtctgttattgttttgttaacaatggcaggttttacacgtctatgcaattgtacaaaaaagttataagaaaactacatgtaaaatcttgatagctaaataacttgccatttctttatatggaacgcattttgggttgtttaaaaatttataacagttataaagaaagattgtaaactaaagtgtgctttataaaaaaaagttgtttataaaaacccctaaaaacaaaacaaacacacacacacacacatacacacacacacacaaaactttgaggcagcgcattgttttgcatccttttggcgtgatatccatatgaaattcatggctttttctttttttgcatattaaagataagacttcctctaccaccacaccaaatgactactacacactgctcatttgagaactgtcagctgagtggggcaggcttgagttttcatttcatatatctatatgtctataagtatataaatactatagttatatagataaagagatacgaatttctatagactgactttttccattttttaaatgttcatgtcacatcctaatagaaagaaattacttctagtcagtcatccaggcttacctgcttggtctagaatggatttttcccggagccggaagccaggaggaaactacaccacactaaaacattgtctacagctccagatgtttctcattttaaacaactttccactgacaacgaaagtaaagtaaagtattggatttttttaaagggaacatgtgaatgaatacacaggacttattatatcagagtgagtaatcggttggttggttgattgattgattgattgatacattcagcttcctgctgctagcaatgccacgatttagatttaatgatgcttcagtggaaatcaatcagaaggtattctgaccttgtgaacatcagaaggtattttttaactcccaagcagtagcaggacgatgatagggctggagggctatggattcccagcccatccctgtgaaggagtaggccactctttaagtgaaggattggatgattgttcataatacataaagttctctgtaattacaactaaattattatgccctcttctcacagtcaaaaggaactgggtggtttggtttttgttgcttttttagatttattgtcccatgtgggatgagtttttaaatgccacaagacataatttaaaataaataaactttgggaaaaggtgtaaaacagtagccccatcacatttgtgatactgacaggtatcaacccagaagcccatgaactgtgtttccatcctttgcatttctctgcgagtagttccacacaggtttgtaagtaagtaagaaagaaggcaaattgattcaaatgttacaaaaaaacccttcttggtggattagacaggttaaatatataaacaaacaaacaaaaattgctcaaaaaagaggagaaaagctcaagaggaaaagctaaggactggtaggaaaaagctttactctttcatgccattttatttctttttgatttttaaatcattcattcaatagataccaccgtgtgacctataattttgcaaatctgttacctctgacatcaagtgtaattagcttttggagagtgggctgacatcaagtgtaattagcttttggagagtgggttttgtccattattaataattaattaattaacatcaaacacggcttctcatgctatttctacctcactttggttttggggtgttcctgataattgtgcacacctgagttcacagcttcaccacttgtccattgcgttattttctttttcctttataattctttctttttccttcataattttcaaaagaaaacccaaagctctaaggtaacaaattaccaaattacatgaagatttggtttttgtcttgcatttttttcctttatgtgacgctggaccttttctttacccaaggatttttaaaactcagatttaaaacaaggggttactttacatcctactaagaagtttaagtaagtaagtttcattctaaaatcagaggtaaatagagtgcataaataattttgttttaatctttttgtttttcttttagacacattagctctggagtgagtctgtcataatatttgaacaaaaattgagagctttattgctgcattttaagcataattaatttggacattatttcgtgttgtgttctttataaccaccaagtattaaactgtaaatcataatgtaactgaagcataaacatcacatggcatgttttgtcattgttttcaggtactgagttcttacttgagtatcataatatattgtgttttaacaccaacactgtaacatttacgaattatttttttaaacttcagttttactgcattttcacaacatatcagacttcaccaaatatatgccttactattgtattatagtactgctttactgtgtatctcaataaagcacgcagttatgttac

SEQ ID NO: 43 - protein, 1243 aa, Homo sapiens
MPSSLMLEVPALADFNRAWTELTDWLSLLDQVIKSQRVMVGDLEDINEMIIKQKATMQDLEQRRPQLEELITAAQNLKNKTSNQEARTIITDRIERIQNQWDEVQEHLQNRRQQLNEMLKDSTQWLEAKEEAEQVLGQARAKLESWKEGPYTVDAIQKKITETKQLAKDLRQWQTNVDVANDLALKLLRDYSADDTRKVHMITENINASWRSIHKRVSEREAALEETHRLLQQFPLDLEKFLAWLTEAETTANVLQDATRKERLLEDSKGVKELMKQWQDLQGEIEAHTDVYHNLDENSQKILRSLEGSDDAVLLQRRLDNMNFKWSELRKKSLNIRSHLEASSDQWKRLHLSLQELLVWLQLKDDELSRQAPIGGDFPAVQKQNDVHRAFKRELKTKEPVIMSTLETVRIFLTEQPLEGLEKLYQEPRELPPEERAQNVTRLLRKQAEEVNTEWEKLNLHSADWQRKIDETLERLQELQEATDELDLKLRQAEVIKGSWQPVGDLLIDSLQDHLEKVKALRGEIAPLKENVSHVNDLARQLTTLGIQLSPYNLSTLEDLNTRWKLLQVAVEDRVRQLHEAHRDFGPASQHFLSTSVQGPWERAISPNKVPYYINHETQTTCWDHPKMTELYQSLADLNNVRFSAYRTAMKLRRLQKALCLDLLSLSAACDALDQHNLKQNDQPMDILQIINCLTTIYDRLEQEHNNLVNVPLCVDMCLNWLLNVYDTGRTGRIRVLSFKTGIISLCKAHLEDKYRYLFKQVASSTGFCDQRRLGLLLHDSIQIPRQLGEVASFGGSNIEPSVRSCFQFANNKPEIEAALFLDWMRLEPQSMVWLPVLHRVAAAETAKHQAKCNICKECPIIGFRYRSLKHFNYDICQSCFFSGRVAKGHKMHYPMVEYCTPTTSGEDVRDFAKVLKNKFRTKRYFAKHPRMGYLPVQTVLEGDNMETPVTLINFWPVDSAPASSPQLSHDDTHSRIEHYASRLAEMENSNGSYLNDSISPNESIDDEHLLIQHYCQSLNQDSPLSQPRSPAQILISLESEERGELERILADLEEENRNLQAEYDRLKQQHEHKGLSPLPSPPEMMPTSPQSPRDAELIAEAKLLRQHKGRLEARMQILEDHNKQLESQLHRLRQLLEQPQAEAKVNGTTVSSPSTSLQRSDSSQPMLLRVVGSQTSDSMGEEDLLSPPQDTSTGLEEVMEQLNNSFPSSRGHNVGSLFHMADDLGRAMESLVSVMTDEEGAE

SEQ ID NO: 44 - DNA, 7339 bp, Homo sapiens
acactagcaatggcaaagctttgtgcggaggcattgctggctgctctgaactaaaagcatccgtggggaccgaaagaggtttttgcacaccttattaaggaactccaggatggcattgggcagcggcaaactgttgtcagaacattgaatgcaactggggaagaaataattcagcaatcctcaaaaacagatgccagtattctacaggaaaaattgggaagcctgaatctgcggtggcaggaggtctgcaaacagctgtcagacagaaaaaagaggctagaagaacaaaagaatatcttgtcagaatttcaaagagatttaaatgaatttgttttatggttggaggaagcagataacattgctagtatcccacttgaacctggaaaagagcagcaactaaaagaaaagcttgagcaagtcaagttactggtggaagagttgcccctgcgccagggaattctcaaacaattaaatgaaactggaggacccgtgcttgtaagtgctcccataagcccagaagagcaagataaacttgaaaataagctcaagcagacaaatctccagtggataaaggtttccagagctttacctgagaaacaaggagaaattgaagctcaaataaaagaccttgggcagcttgaaaaaaagcttgaagaccttgaagagcagttaaatcatctgctgctgtggttatctcctattaggaatcagttggaaatttataaccaaccaaaccaagaaggaccatttgacgttcaggaaactgaaatagcagttcaagctaaacaaccggatgtggaagagattttgtctaaagggcagcatttgtacaaggaaaaaccagccactcagccagtgaagaggaagttagaagatctgagctctgagtggaaggcggtaaaccgtttacttcaagagctgagggcaaagcagcctgacctagctcctggactgaccactattggagcctctcctactcagactgttactctggtgacacaacctgtggttactaaggaaactgccatctccaaactagaaatgccatcttccttgatgttggaggtacctgctctggcagatttcaaccgggcttggacagaacttaccgactggctttctctgcttgatcaagttataaaatcacagagggtgatggtgggtgaccttgaggatatcaacgagatgatcatcaagcagaaggcaacaatgcaggatttggaacagaggcgtccccagttggaagaactcattaccgctgcccaaaatttgaaaaacaagaccagcaatcaagaggctagaacaatcattacggatcgaattgaaagaattcagaatcagtgggatgaagtacaagaacaccttcagaaccggaggcaacagttgaatgaaatgttaaaggattcaacacaatggctggaagctaaggaagaagctgagcaggtcttaggacaggccagagccaagcttgagtcatggaaggagggtccctatacagtagatgcaatccaaaagaaaatcacagaaaccaagcagttggccaaagacctccgccagtggcagacaaatgtagatgtggcaaatgacttggccctgaaacttctccgggattattctgcagatgataccagaaaagtccacatgataacagagaatatcaatgcctcttggagaagcattcataaaagggtgagtgagcgagaggctgctttggaagaaactcatagattactgcaacagttccccctggacctggaaaagtttcttgcctggcttacagaagctgaaacaactgccaatgtcctacaggatgctacccgtaaggaaaggctcctagaagactccaagggagtaaaagagctgatgaaacaatggcaagacctccaaggtgaaattgaagctcacacagatgtttatcacaacctggatgaaaacagccaaaaaatcctgagatccctggaaggttccgatgatgcagtcctgttacaaagacgtttggataacatgaacttcaagtggagtgaacttcggaaaaagtctctcaacattaggtcccatttggaagccagttctgaccagtggaagcgtctgcacctttctctgcaggaacttctggtgtggctacagctgaaagatgatgaattaagccggcaggcacctattggaggcgactttccagcagttcagaagcagaacgatgtacatagggccttcaagagggaattgaaaactaaagaacctgtaatcatgagtactcttgagactgtacgaatatttctgacagagcagcctttggaaggactagagaaactctaccaggagcccagagagctgcctcctgaggagagagcccagaatgtcactcggcttctacgaaagcaggctgaggaggtcaatactgagtgggaaaaattgaacctgcactccgctgactggcagagaaaaatagatgagacccttgaaagactccaggaacttcaagaggccacggatgagctggacctcaagctgcgccaagctgaggtgatcaagggatcctggcagcccgtgggcgatctcctcattgactctctccaagatcacctcgagaaagtcaaggcacttcgaggagaaattgcgcctctgaaagagaacgtgagccacgtcaatgaccttgctcgccagcttaccactttgggcattcagctctcaccgtataacctcagcactctggaagacctgaacaccagatggaagcttctgcaggtggccgtcgaggaccgagtcaggcagctgcatgaagcccacagggactttggtccagcatctcagcactttctttccacgtctgtccagggtccctgggagagagccatctcgccaaacaaagtgccctactatatcaaccacgagactcaaacaacttgctgggaccatcccaaaatgacagagctctaccagtctttagctgacctgaataatgtcagattctcagcttataggactgccatgaaactccgaagactgcagaaggccctttgcttggatctcttgagcctgtcagctgcatgtgatgccttggaccagcacaacctcaagcaaaatgaccagcccatggatatcctgcagattattaattgtttgaccactatttatgaccgcctggagcaagagcacaacaatttggtcaacgtccctctctgcgtggatatgtgtctgaactggctgctgaatgtttatgatacgggacgaacagggaggatccgtgtcctgtcttttaaaactggcatcatttccctgtgtaaagcacatttggaagacaagtacagataccttttcaagcaagtggcaagttcaacaggattttgtgaccagcgcaggctgggcctccttctgcatgattctatccaaattccaagacagttgggtgaagttgcatcctttgggggcagtaacattgagccaagtgtccggagctgcttccaatttgctaataataagccagagatcgaagcggccctcttcctagactggatgagactggaaccccagtccatggtgtggctgcccgtcctgcacagagtggctgctgcagaaactgccaagcatcaggccaaatgtaacatctgcaaagagtgtccaatcattggattcaggtacaggagtctaaagcactttaattatgacatctgccaaagctgctttttttctggtcgagttgcaaaaggccataaaatgcactatcccatggtggaatattgcactccgactacatcaggagaagatgttcgagactttgccaaggtactaaaaaacaaatttcgaaccaaaaggtattttgcgaagcatccccgaatgggctacctgccagtgcagactgtcttagagggggacaacatggaaacgcctgcctcgtcccctcagctttcacacgatgatactcattcacgcattgaacattatgctagcaggctagcagaaatggaaaacagcaatggatcttatctaaatgatagcatctctcctaatgagagcatagatgatgaacatttgttaatccagcattactgccaaagtttgaaccaggactcccccctgagccagcctcgtagtcctgcccagatcttgatttccttagagagtgaggaaagaggggagctagagagaatcctagcagatcttgaggaagaaaacaggaatctgcaagcagaatatgaccgtctaaagcagcagcacgaacataaaggcctgtccccactgccgtcccctcctgaaatgatgcccacctctccccagagtccccgggatgctgagctcattgctgaggccaagctactgcgtcaacacaaaggccgcctggaagccaggatgcaaatcctggaagaccacaataaacagctggagtcacagttacacaggctaaggcagctgctggagcaaccccaggcagaggccaaagtgaatggcacaacggtgtcctctccttctacctctctacagaggtccgacagcagtcagcctatgctgctccgagtggttggcagtcaaacttcggactccatgggtgaggaagatcttctcagtcctccccaggacacaagcacagggttagaggaggtgatggagcaactcaacaactccttccctagttcaagaggacacaatgtaggaagtcttttccacatggcagatgatttgggcagagcgatggagtccttagtatcagtcatgacagatgaagaaggagcagaataaatgttttacaactcctgattcccgcatggtttttataatattcatacaacaaagaggattagacagtaagagtttacaagaaataaatctatatttttgtgaagggtagtggtattatactgtagatttcagtagtttctaagtctgttattgttttgttaacaatggcaggttttacacgtctatgcaattgtacaaaaaagttataagaaaactacatgtaaaatcttgatagctaaataacttgccatttctttatatggaacgcattttgggttgtttaaaaatttataacagttataaagaaagattgtaaactaaagtgtgctttataaaaaaaagttgtttataaaaacccctaaaaacaaaacaaacacacacacacacacatacacacacacacacaaaactttgaggcagcgcattgttttgcatccttttggcgtgatatccatatgaaattcatggctttttctttttttgcatattaaagataagacttcctctaccaccacaccaaatgactactacacactgctcatttgagaactgtcagctgagtggggcaggcttgagttttcatttcatatatctatatgtctataagtatataaatactatagttatatagataaagagatacgaatttctatagactgactttttccattttttaaatgttcatgtcacatcctaatagaaagaaattacttctagtcagtcatccaggcttacctgcttggtctagaatggatttttcccggagccggaagccaggaggaaactacaccacactaaaacattgtctacagctccagatgtttctcattttaaacaactttccactgacaacgaaagtaaagtaaagtattggatttttttaaagggaacatgtgaatgaatacacaggacttattatatcagagtgagtaatcggttggttggttgattgattgattgattgatacattcagcttcctgctgctagcaatgccacgatttagatttaatgatgcttcagtggaaatcaatcagaaggtattctgaccttgtgaacatcagaaggtattttttaactcccaagcagtagcaggacgatgatagggctggagggctatggattcccagcccatccctgtgaaggagtaggccactctttaagtgaaggattggatgattgttcataatacataaagttctctgtaattacaactaaattattatgccctcttctcacagtcaaaaggaactgggtggtttggtttttgttgcttttttagatttattgtcccatgtgggatgagtttttaaatgccacaagacataatttaaaataaataaactttgggaaaaggtgtaaaacagtagccccatcacatttgtgatactgacaggtatcaacccagaagcccatgaactgtgtttccatcctttgcatttctctgcgagtagttccacacaggtttgtaagtaagtaagaaagaaggcaaattgattcaaatgttacaaaaaaacccttcttggtggattagacaggttaaatatataaacaaacaaacaaaaattgctcaaaaaagaggagaaaagctcaagaggaaaagctaaggactggtaggaaaaagctttactctttcatgccattttatttctttttgatttttaaatcattcattcaatagataccaccgtgtgacctataattttgcaaatctgttacctctgacatcaagtgtaattagcttttggagagtgggctgacatcaagtgtaattagcttttggagagtgggttttgtccattattaataattaattaattaacatcaaacacggcttctcatgctatttctacctcactttggttttggggtgttcctgataattgtgcacacctgagttcacagcttcaccacttgtccattgcgttattttctttttcctttataattctttctttttccttcataattttcaaaagaaaacccaaagctctaaggtaacaaattaccaaattacatgaagatttggtttttgtcttgcatttttttcctttatgtgacgctggaccttttctttacccaaggatttttaaaactcagatttaaaacaaggggttactttacatcctactaagaagtttaagtaagtaagtttcattctaaaatcagaggtaaatagagtgcataaataattttgttttaatctttttgtttttcttttagacacattagctctggagtgagtctgtcataatatttgaacaaaaattgagagctttattgctgcattttaagcataattaatttggacattatttcgtgttgtgttctttataaccaccaagtattaaactgtaaatcataatgtaactgaagcataaacatcacatggcatgttttgtcattgttttcaggtactgagttcttacttgagtatcataatatattgtgttttaacaccaacactgtaacatttacgaattatttttttaaacttcagttttactgcattttcacaacatatcagacttcaccaaatatatgccttactattgtattatagtactgctttactgtgtatctcaataaagcacgcagttatgttac

SEQ ID NO: 45 - protein, 1230 aa, Homo sapiens
MPSSLMLEVPALADFNRAWTELTDWLSLLDQVIKSQRVMVGDLEDINEMIIKQKATMQDLEQRRPQLEELITAAQNLKNKTSNQEARTIITDRIERIQNQWDEVQEHLQNRRQQLNEMLKDSTQWLEAKEEAEQVLGQARAKLESWKEGPYTVDAIQKKITETKQLAKDLRQWQTNVDVANDLALKLLRDYSADDTRKVHMITENINASWRSIHKRVSEREAALEETHRLLQQFPLDLEKFLAWLTEAETTANVLQDATRKERLLEDSKGVKELMKQWQDLQGEIEAHTDVYHNLDENSQKILRSLEGSDDAVLLQRRLDNMNFKWSELRKKSLNIRSHLEASSDQWKRLHLSLQELLVWLQLKDDELSRQAPIGGDFPAVQKQNDVHRAFKRELKTKEPVIMSTLETVRIFLTEQPLEGLEKLYQEPRELPPEERAQNVTRLLRKQAEEVNTEWEKLNLHSADWQRKIDETLERLQELQEATDELDLKLRQAEVIKGSWQPVGDLLIDSLQDHLEKVKALRGEIAPLKENVSHVNDLARQLTTLGIQLSPYNLSTLEDLNTRWKLLQVAVEDRVRQLHEAHRDFGPASQHFLSTSVQGPWERAISPNKVPYYINHETQTTCWDHPKMTELYQSLADLNNVRFSAYRTAMKLRRLQKALCLDLLSLSAACDALDQHNLKQNDQPMDILQIINCLTTIYDRLEQEHNNLVNVPLCVDMCLNWLLNVYDTGRTGRIRVLSFKTGIISLCKAHLEDKYRYLFKQVASSTGFCDQRRLGLLLHDSIQIPRQLGEVASFGGSNIEPSVRSCFQFANNKPEIEAALFLDWMRLEPQSMVWLPVLHRVAAAETAKHQAKCNICKECPIIGFRYRSLKHFNYDICQSCFFSGRVAKGHKMHYPMVEYCTPTTSGEDVRDFAKVLKNKFRTKRYFAKHPRMGYLPVQTVLEGDNMETPASSPQLSHDDTHSRIEHYASRLAEMENSNGSYLNDSISPNESIDDEHLLIQHYCQSLNQDSPLSQPRSPAQILISLESEERGELERILADLEEENRNLQAEYDRLKQQHEHKGLSPLPSPPEMMPTSPQSPRDAELIAEAKLLRQHKGRLEARMQILEDHNKQLESQLHRLRQLLEQPQAEAKVNGTTVSSPSTSLQRSDSSQPMLLRVVGSQTSDSMGEEDLLSPPQDTSTGLEEVMEQLNNSFPSSRGHNVGSLFHMADDLGRAMESLVSVMTDEEGAE

SEQ ID NO: 46 - DNA, 7048 bp, Homo sapiens
acactagcaatggcaaagctttgtgcggaggcattgctggctgctctgaactaaaagcatccgtggggaccgaaagaggtttttgcacaccttattaaggaactccaggatggcattgggcagcggcaaactgttgtcagaacattgaatgcaactggggaagaaataattcagcaatcctcaaaaacagatgccagtattctacaggaaaaattgggaagcctgaatctgcggtggcaggaggtctgcaaacagctgtcagacagaaaaaagaggctagaagaacaaaagaatatcttgtcagaatttcaaagagatttaaatgaatttgttttatggttggaggaagcagataacattgctagtatcccacttgaacctggaaaagagcagcaactaaaagaaaagcttgagcaagtcaagttactggtggaagagttgcccctgcgccagggaattctcaaacaattaaatgaaactggaggacccgtgcttgtaagtgctcccataagcccagaagagcaagataaacttgaaaataagctcaagcagacaaatctccagtggataaaggtttccagagctttacctgagaaacaaggagaaattgaagctcaaataaaagaccttgggcagcttgaaaaaaagcttgaagaccttgaagagcagttaaatcatctgctgctgtggttatctcctattaggaatcagttggaaatttataaccaaccaaaccaagaaggaccatttgacgttcaggaaactgaaatagcagttcaagctaaacaaccggatgtggaagagattttgtctaaagggcagcatttgtacaaggaaaaaccagccactcagccagtgaagaggaagttagaagatctgagctctgagtggaaggcggtaaaccgtttacttcaagagctgagggcaaagcagcctgacctagctcctggactgaccactattggagcctctcctactcagactgttactctggtgacacaacctgtggttactaaggaaactgccatctccaaactagaaatgccatcttccttgatgttggaggtacctgctctggcagatttcaaccgggcttggacagaacttaccgactggctttctctgcttgatcaagttataaaatcacagagggtgatggtgggtgaccttgaggatatcaacgagatgatcatcaagcagaaggcaacaatgcaggatttggaacagaggcgtccccagttggaagaactcattaccgctgcccaaaatttgaaaaacaagaccagcaatcaagaggctagaacaatcattacggatcgaattgaaagaattcagaatcagtgggatgaagtacaagaacaccttcagaaccggaggcaacagttgaatgaaatgttaaaggattcaacacaatggctggaagctaaggaagaagctgagcaggtcttaggacaggccagagccaagcttgagtcatggaaggagggtccctatacagtagatgcaatccaaaagaaaatcacagaaaccaagcagttggccaaagacctccgccagtggcagacaaatgtagatgtggcaaatgacttggccctgaaacttctccgggattattctgcagatgataccagaaaagtccacatgataacagagaatatcaatgcctcttggagaagcattcataaaagggtgagtgagcgagaggctgctttggaagaaactcatagattactgcaacagttccccctggacctggaaaagtttcttgcctggcttacagaagctgaaacaactgccaatgtcctacaggatgctacccgtaaggaaaggctcctagaagactccaagggagtaaaagagctgatgaaacaatggcaagacctccaaggtgaaattgaagctcacacagatgtttatcacaacctggatgaaaacagccaaaaaatcctgagatccctggaaggttccgatgatgcagtcctgttacaaagacgtttggataacatgaacttcaagtggagtgaacttcggaaaaagtctctcaacattaggtcccatttggaagccagttctgaccagtggaagcgtctgcacctttctctgcaggaacttctggtgtggctacagctgaaagatgatgaattaagccggcaggcacctattggaggcgactttccagcagttcagaagcagaacgatgtacatagggccttcaagagggaattgaaaactaaagaacctgtaatcatgagtactcttgagactgtacgaatatttctgacagagcagcctttggaaggactagagaaactctaccaggagcccagagagctgcctcctgaggagagagcccagaatgtcactcggcttctacgaaagcaggctgaggaggtcaatactgagtgggaaaaattgaacctgcactccgctgactggcagagaaaaatagatgagacccttgaaagactccaggaacttcaagaggccacggatgagctggacctcaagctgcgccaagctgaggtgatcaagggatcctggcagcccgtgggcgatctcctcattgactctctccaagatcacctcgagaaagtcaaggcacttcgaggagaaattgcgcctctgaaagagaacgtgagccacgtcaatgaccttgctcgccagcttaccactttgggcattcagctctcaccgtataacctcagcactctggaagacctgaacaccagatggaagcttctgcaggtggccgtcgaggaccgagtcaggcagctgcatgaagcccacagggactttggtccagcatctcagcactttctttccacgtctgtccagggtccctgggagagagccatctcgccaaacaaagtgccctactatatcaaccacgagactcaaacaacttgctgggaccatcccaaaatgacagagctctaccagtctttagctgacctgaataatgtcagattctcagcttataggactgccatgaaactccgaagactgcagaaggccctttgcttggatctcttgagcctgtcagctgcatgtgatgccttggaccagcacaacctcaagcaaaatgaccagcccatggatatcctgcagattattaattgtttgaccactatttatgaccgcctggagcaagagcacaacaatttggtcaacgtccctctctgcgtggatatgtgtctgaactggctgctgaatgtttatgatacgggacgaacagggaggatccgtgtcctgtcttttaaaactggcatcatttccctgtgtaaagcacatttggaagacaagtacagataccttttcaagcaagtggcaagttcaacaggattttgtgaccagcgcaggctgggcctccttctgcatgattctatccaaattccaagacagttgggtgaagttgcatcctttgggggcagtaacattgagccaagtgtccggagctgcttccaatttgctaataataagccagagatcgaagcggccctcttcctagactggatgagactggaaccccagtccatggtgtggctgcccgtcctgcacagagtggctgctgcagaaactgccaagcatcaggccaaatgtaacatctgcaaagagtgtccaatcattggattcaggtacaggagtctaaagcactttaattatgacatctgccaaagctgctttttttctggtcgagttgcaaaaggccataaaatgcactatcccatggtggaatattgcactccgactacatcaggagaagatgttcgagactttgccaaggtactaaaaaacaaatttcgaaccaaaaggtattttgcgaagcatccccgaatgggctacctgccagtgcagactgtcttagagggggacaacatggaaacgaatctgcaagcagaatatgaccgtctaaagcagcagcacgaacataaaggcctgtccccactgccgtcccctcctgaaatgatgcccacctctccccagagtccccgggatgctgagctcattgctgaggccaagctactgcgtcaacacaaaggccgcctggaagccaggatgcaaatcctggaagaccacaataaacagctggagtcacagttacacaggctaaggcagctgctggagcaaccccaggcagaggccaaagtgaatggcacaacggtgtcctctccttctacctctctacagaggtccgacagcagtcagcctatgctgctccgagtggttggcagtcaaacttcggactccatgggtgaggaagatcttctcagtcctccccaggacacaagcacagggttagaggaggtgatggagcaactcaacaactccttccctagttcaagaggacacaatgtaggaagtcttttccacatggcagatgatttgggcagagcgatggagtccttagtatcagtcatgacagatgaagaaggagcagaataaatgttttacaactcctgattcccgcatggtttttataatattcatacaacaaagaggattagacagtaagagtttacaagaaataaatctatatttttgtgaagggtagtggtattatactgtagatttcagtagtttctaagtctgttattgttttgttaacaatggcaggttttacacgtctatgcaattgtacaaaaaagttataagaaaactacatgtaaaatcttgatagctaaataacttgccatttctttatatggaacgcattttgggttgtttaaaaatttataacagttataaagaaagattgtaaactaaagtgtgctttataaaaaaaagttgtttataaaaacccctaaaaacaaaacaaacacacacacacacacatacacacacacacacaaaactttgaggcagcgcattgttttgcatccttttggcgtgatatccatatgaaattcatggctttttctttttttgcatattaaagataagacttcctctaccaccacaccaaatgactactacacactgctcatttgagaactgtcagctgagtggggcaggcttgagttttcatttcatatatctatatgtctataagtatataaatactatagttatatagataaagagatacgaatttctatagactgactttttccattttttaaatgttcatgtcacatcctaatagaaagaaattacttctagtcagtcatccaggcttacctgcttggtctagaatggatttttcccggagccggaagccaggaggaaactacaccacactaaaacattgtctacagctccagatgtttctcattttaaacaactttccactgacaacgaaagtaaagtaaagtattggatttttttaaagggaacatgtgaatgaatacacaggacttattatatcagagtgagtaatcggttggttggttgattgattgattgattgatacattcagcttcctgctgctagcaatgccacgatttagatttaatgatgcttcagtggaaatcaatcagaaggtattctgaccttgtgaacatcagaaggtattttttaactcccaagcagtagcaggacgatgatagggctggagggctatggattcccagcccatccctgtgaaggagtaggccactctttaagtgaaggattggatgattgttcataatacataaagttctctgtaattacaactaaattattatgccctcttctcacagtcaaaaggaactgggtggtttggtttttgttgcttttttagatttattgtcccatgtgggatgagtttttaaatgccacaagacataatttaaaataaataaactttgggaaaaggtgtaaaacagtagccccatcacatttgtgatactgacaggtatcaacccagaagcccatgaactgtgtttccatcctttgcatttctctgcgagtagttccacacaggtttgtaagtaagtaagaaagaaggcaaattgattcaaatgttacaaaaaaacccttcttggtggattagacaggttaaatatataaacaaacaaacaaaaattgctcaaaaaagaggagaaaagctcaagaggaaaagctaaggactggtaggaaaaagctttactctttcatgccattttatttctttttgatttttaaatcattcattcaatagataccaccgtgtgacctataattttgcaaatctgttacctctgacatcaagtgtaattagcttttggagagtgggctgacatcaagtgtaattagcttttggagagtgggttttgtccattattaataattaattaattaacatcaaacacggcttctcatgctatttctacctcactttggttttggggtgttcctgataattgtgcacacctgagttcacagcttcaccacttgtccattgcgttattttctttttcctttataattctttctttttccttcataattttcaaaagaaaacccaaagctctaaggtaacaaattaccaaattacatgaagatttggtttttgtcttgcatttttttcctttatgtgacgctggaccttttctttacccaaggatttttaaaactcagatttaaaacaaggggttactttacatcctactaagaagtttaagtaagtaagtttcattctaaaatcagaggtaaatagagtgcataaataattttgttttaatctttttgtttttcttttagacacattagctctggagtgagtctgtcataatatttgaacaaaaattgagagctttattgctgcattttaagcataattaatttggacattatttcgtgttgtgttctttataaccaccaagtattaaactgtaaatcataatgtaactgaagcataaacatcacatggcatgttttgtcattgttttcaggtactgagttcttacttgagtatcataatatattgtgttttaacaccaacactgtaacatttacgaattatttttttaaacttcagttttactgcattttcacaacatatcagacttcaccaaatatatgccttactattgtattatagtactgctttactgtgtatctcaataaagcacgcagttatgttac

SEQ ID NO: 47 - protein, 1133 aa, Homo sapiens
MPSSLMLEVPALADFNRAWTELTDWLSLLDQVIKSQRVMVGDLEDINEMIIKQKATMQDLEQRRPQLEELITAAQNLKNKTSNQEARTIITDRIERIQNQWDEVQEHLQNRRQQLNEMLKDSTQWLEAKEEAEQVLGQARAKLESWKEGPYTVDAIQKKITETKQLAKDLRQWQTNVDVANDLALKLLRDYSADDTRKVHMITENINASWRSIHKRVSEREAALEETHRLLQQFPLDLEKFLAWLTEAETTANVLQDATRKERLLEDSKGVKELMKQWQDLQGEIEAHTDVYHNLDENSQKILRSLEGSDDAVLLQRRLDNMNFKWSELRKKSLNIRSHLEASSDQWKRLHLSLQELLVWLQLKDDELSRQAPIGGDFPAVQKQNDVHRAFKRELKTKEPVIMSTLETVRIFLTEQPLEGLEKLYQEPRELPPEERAQNVTRLLRKQAEEVNTEWEKLNLHSADWQRKIDETLERLQELQEATDELDLKLRQAEVIKGSWQPVGDLLIDSLQDHLEKVKALRGEIAPLKENVSHVNDLARQLTTLGIQLSPYNLSTLEDLNTRWKLLQVAVEDRVRQLHEAHRDFGPASQHFLSTSVQGPWERAISPNKVPYYINHETQTTCWDHPKMTELYQSLADLNNVRFSAYRTAMKLRRLQKALCLDLLSLSAACDALDQHNLKQNDQPMDILQIINCLTTIYDRLEQEHNNLVNVPLCVDMCLNWLLNVYDTGRTGRIRVLSFKTGIISLCKAHLEDKYRYLFKQVASSTGFCDQRRLGLLLHDSIQIPRQLGEVASFGGSNIEPSVRSCFQFANNKPEIEAALFLDWMRLEPQSMVWLPVLHRVAAAETAKHQAKCNICKECPIIGFRYRSLKHFNYDICQSCFFSGRVAKGHKMHYPMVEYCTPTTSGEDVRDFAKVLKNKFRTKRYFAKHPRMGYLPVQTVLEGDNMETNLQAEYDRLKQQHEHKGLSPLPSPPEMMPTSPQSPRDAELIAEAKLLRQHKGRLEARMQILEDHNKQLESQLHRLRQLLEQPQAEAKVNGTTVSSPSTSLQRSDSSQPMLLRVVGSQTSDSMGEEDLLSPPQDTSTGLEEVMEQLNNSFPSSRGHNVGSLFHMADDLGRAMESLVSVMTDEEGAE

SEQ ID NO: 48 - DNA, 13897 bp, Homo sapiens
acctaacctaacttgaatcatgcgaaaggggagctgttggaattcaaatagactttctggttcccagcagtcggcagtaatagaatgctttcaggaagatgacagaatcaggagaaagatgctgttttgcactatcttgatttgttacagcagccaacttattggcatgatggagtgacaggaaaaacagctggcatggaagatgaaagagaagatgttcaaaagaaaacattcacaaaatgggtaaatgcacaattttctaagtttgggaagcagcatattgagaacctcttcagtgacctacaggatgggaggcgcctcctagacctcctcgaaggcctgacagggcaaaaactgccaaaagaaaaaggatccacaagagttcatgccctgaacaatgtcaacaaggcactgcgggttttgcagaacaataatgttgatttagtgaatattggaagtactgacatcgtagatggaaatcataaactgactcttggtttgatttggaatataatcctccactggcaggtcaaaaatgtaatgaaaaatatcatggctggattgcaacaaaccaacagtgaaaagattctcctgagctgggtccgacaatcaactcgtaattatccacaggttaatgtaatcaacttcaccaccagctggtctgatggcctggctttgaatgctctcatccatagtcataggccagacctatttgactggaatagtgtggtttgccagcagtcagccacacaacgactggaacatgcattcaacatcgccagatatcaattaggcatagagaaactactcgatcctgaagatgttgataccacctatccagataagaagtccatcttaatgtacatcacatcactcttccaagttttgcctcaacaagtgagcattgaagccatccaggaagtggaaatgttgccaaggccacctaaagtgactaaagaagaacattttcagttacatcatcaaatgcactattctcaacagatcacggtcagtctagcacagggatatgagagaacttcttcccctaagcctcgattcaagagctatgcctacacacaggctgcttatgtcaccacctctgaccctacacggagcccatttccttcacagcatttggaagctcctgaagacaagtcatttggcagttcattgatggagagtgaagtaaacctggaccgttatcaaacagctttagaagaagtattatcgtggcttctttctgctgaggacacattgcaagcacaaggagagatttctaatgatgtggaagtggtgaaagaccagtttcatactcatgaggggtacatgatggatttgacagcccatcagggccgggttggtaatattctacaattgggaagtaagctgattggaacaggaaaattatcagaagatgaagaaactgaagtacaagagcagatgaatctcctaaattcaagatgggaatgcctcagggtagctagcatggaaaaacaaagcaatttacatagagttttaatggatctccagaatcagaaactgaaagagttgaatgactggctaacaaaaacagaagaaagaacaaggaaaatggaggaagagcctcttggacctgatcttgaagacctaaaacgccaagtacaacaacataaggtgcttcaagaagatctagaacaagaacaagtcagggtcaattctctcactcacatggtggtggtagttgatgaatctagtggagatcacgcaactgctgctttggaagaacaacttaaggtattgggagatcgatgggcaaacatctgtagatggacagaagaccgctgggttcttttacaagacatccttctcaaatggcaacgtcttactgaagaacagtgcctttttagtgcatggctttcagaaaaagaagatgcagtgaacaagattcacacaactggctttaaagatcaaaatgaaatgttatcaagtcttcaaaaactggccgttttaaaagcggatctagaaaagaaaaagcaatccatgggcaaactgtattcactcaaacaagatcttctttcaacactgaagaataagtcagtgacccagaagacggaagcatggctggataactttgcccggtgttgggataatttagtccaaaaacttgaaaagagtacagcacagatttcacaggctgtcaccaccactcagccatcactaacacagacaactgtaatggaaacagtaactacggtgaccacaagggaacagatcctggtaaagcatgctcaagaggaacttccaccaccacctccccaaaagaagaggcagattactgtggattctgaaattaggaaaaggttggatgttgatataactgaacttcacagctggattactcgctcagaagctgtgttgcagagtcctgaatttgcaatctttcggaaggaaggcaacttctcagacttaaaagaaaaagtcaatgccatagagcgagaaaaagctgagaagttcagaaaactgcaagatgccagcagatcagctcaggccctggtggaacagatggtgaatgagggtgttaatgcagatagcatcaaacaagcctcagaacaactgaacagccggtggatcgaattctgccagttgctaagtgagagacttaactggctggagtatcagaacaacatcatcgctttctataatcagctacaacaattggagcagatgacaactactgctgaaaactggttgaaaatccaacccaccaccccatcagagccaacagcaattaaaagtcagttaaaaatttgtaaggatgaagtcaaccggctatcagatcttcaacctcaaattgaacgattaaaaattcaaagcatagccctgaaagagaaaggacaaggacccatgttcctggatgcagactttgtggcctttacaaatcattttaagcaagtcttttctgatgtgcaggccagagagaaagagctacagacaatttttgacactttgccaccaatgcgctatcaggagaccatgagtgccatcaggacatgggtccagcagtcagaaaccaaactctccatacctcaacttagtgtcaccgactatgaaatcatggagcagagactcggggaattgcaggctttacaaagttctctgcaagagcaacaaagtggcctatactatctcagcaccactgtgaaagagatgtcgaagaaagcgccctctgaaattagccggaaatatcaatcagaatttgaagaaattgagggacgctggaagaagctctcctcccagctggttgagcattgtcaaaagctagaggagcaaatgaataaactccgaaaaattcagaatcacatacaaaccctgaagaaatggatggctgaagttgatgtttttctgaaggaggaatggcctgcccttggggattcagaaattctaaaaaagcagctgaaacagtgcagacttttagtcagtgatattcagacaattcagcccagtctaaacagtgtcaatgaaggtgggcagaagataaagaatgaagcagagccagagtttgcttcgagacttgagacagaactcaaagaacttaacactcagtgggatcacatgtgccaacaggtctatgccagaaaggaggccttgaagggaggtttggagaaaactgtaagcctccagaaagatctatcagagatgcacgaatggatgacacaagctgaagaagagtatcttgagagagattttgaatataaaactccagatgaattacagaaagcagttgaagagatgaagagagctaaagaagaggcccaacaaaaagaagcgaaagtgaaactccttactgagtctgtaaatagtgtcatagctcaagctccacctgtagcacaagaggccttaaaaaaggaacttgaaactctaaccaccaactaccagtggctctgcactaggctgaatgggaaatgcaagactttggaagaagtttgggcatgttggcatgagttattgtcatacttggagaaagcaaacaagtggctaaatgaagtagaatttaaacttaaaaccactgaaaacattcctggcggagctgaggaaatctctgaggtgctagattcacttgaaaatttgatgcgacattcagaggataacccaaatcagattcgcatattggcacagaccctaacagatggcggagtcatggatgagctaatcaatgaggaacttgagacatttaattctcgttggagggaactacatgaagaggctgtaaggaggcaaaagttgcttgaacagagcatccagtctgcccaggagactgaaaaatccttacacttaatccaggagtccctcacattcattgacaagcagttggcagcttatattgcagacaaggtggacgcagctcaaatgcctcaggaagcccagaaaatccaatctgatttgacaagtcatgagatcagtttagaagaaatgaagaaacataatcaggggaaggaggctgcccaaagagtcctgtctcagattgatgttgcacagaaaaaattacaagatgtctccatgaagtttcgattattccagaaaccagccaattttgagcagcgtctacaagaaagtaagatgattttagatgaagtgaagatgcacttgcctgcattggaaacaaagagtgtggaacaggaagtagtacagtcacagctaaatcattgtgtgaacttgtataaaagtctgagtgaagtgaagtctgaagtggaaatggtgataaagactggacgtcagattgtacagaaaaagcagacggaaaatcccaaagaacttgatgaaagagtaacagctttgaaattgcattataatgagctgggagcaaaggtaacagaaagaaagcaacagttggagaaatgcttgaaattgtcccgtaagatgcgaaaggaaatgaatgtcttgacagaatggctggcagctacagatatggaattgacaaagagatcagcagttgaaggaatgcctagtaatttggattctgaagttgcctggggaaaggctactcaaaaagagattgagaaacagaaggtgcacctgaagagtatcacagaggtaggagaggccttgaaaacagttttgggcaagaaggagacgttggtggaagataaactcagtcttctgaatagtaactggatagctgtcacctcccgagcagaagagtggttaaatcttttgttggaataccagaaacacatggaaacttttgaccagaatgtggaccacatcacaaagtggatcattcaggctgacacacttttggatgaatcagagaaaaagaaaccccagcaaaaagaagacgtgcttaagcgtttaaaggcagaactgaatgacatacgcccaaaggtggactctacacgtgaccaagcagcaaacttgatggcaaaccgcggtgaccactgcaggaaattagtagagccccaaatctcagagctcaaccatcgatttgcagccatttcacacagaattaagactggaaaggcctccattcctttgaaggaattggagcagtttaactcagatatacaaaaattgcttgaaccactggaggctgaaattcagcagggggtgaatctgaaagaggaagacttcaataaagatatgaatgaagacaatgagggtactgtaaaagaattgttgcaaagaggagacaacttacaacaaagaatcacagatgagagaaagcgagaggaaataaagataaaacagcagctgttacagacaaaacataatgctctcaaggatttgaggtctcaaagaagaaaaaaggctctagaaatttctcatcagtggtatcagtacaagaggcaggctgatgatctcctgaaatgcttggatgacattgaaaaaaaattagccagcctacctgagcccagagatgaaaggaaaataaaggaaattgatcgggaattgcagaagaagaaagaggagctgaatgcagtgcgtaggcaagctgagggcttgtctgaggatggggccgcaatggcagtggagccaactcagatccagctcagcaagcgctggcgggaaattgagagcaaatttgctcagtttcgaagactcaactttgcacaaattcacactgtccgtgaagaaacgatgatggtgatgactgaagacatgcctttggaaatttcttatgtgccttctacttatttgactgaaatcactcatgtctcacaagccctattagaagtggaacaacttctcaatgctcctgacctctgtgctaaggactttgaagatctctttaagcaagaggagtctctgaagaatataaaagatagtctacaacaaagctcaggtcggattgacattattcatagcaagaagacagcagcattgcaaagtgcaacgcctgtggaaagggtgaagctacaggaagctctctcccagcttgatttccaatgggaaaaagttaacaaaatgtacaaggaccgacaagggcgatttgacagatctgttgagaaatggcggcgttttcattatgatataaagatatttaatcagtggctaacagaagctgaacagtttctcagaaagacacaaattcctgagaattgggaacatgctaaatacaaatggtatcttaaggaactccaggatggcattgggcagcggcaaactgttgtcagaacattgaatgcaactggggaagaaataattcagcaatcctcaaaaacagatgccagtattctacaggaaaaattgggaagcctgaatctgcggtggcaggaggtctgcaaacagctgtcagacagaaaaaagaggctagaagaacaaaagaatatcttgtcagaatttcaaagagatttaaatgaatttgttttatggttggaggaagcagataacattgctagtatcccacttgaacctggaaaagagcagcaactaaaagaaaagcttgagcaagtcaagttactggtggaagagttgcccctgcgccagggaattctcaaacaattaaatgaaactggaggacccgtgcttgtaagtgctcccataagcccagaagagcaagataaacttgaaaataagctcaagcagacaaatctccagtggataaaggtttccagagctttacctgagaaacaaggagaaattgaagctcaaataaaagaccttgggcagcttgaaaaaaagcttgaagaccttgaagagcagttaaatcatctgctgctgtggttatctcctattaggaatcagttggaaatttataaccaaccaaaccaagaaggaccatttgacgttaaggaaactgaaatagcagttcaagctaaacaaccggatgtggaagagattttgtctaaagggcagcatttgtacaaggaaaaaccagccactcagccagtgaagaggaagttagaagatctgagctctgagtggaaggcggtaaaccgtttacttcaagagctgagggcaaagcagcctgacctagctcctggactgaccactattggagcctctcctactcagactgttactctggtgacacaacctgtggttactaaggaaactgccatctccaaactagaaatgccatcttccttgatgttggaggtacctgctctggcagatttcaaccgggcttggacagaacttaccgactggctttctctgcttgatcaagttataaaatcacagagggtgatggtgggtgaccttgaggatatcaacgagatgatcatcaagcagaaggcaacaatgcaggatttggaacagaggcgtccccagttggaagaactcattaccgctgcccaaaatttgaaaaacaagaccagcaatcaagaggctagaacaatcattacggatcgaattgaaagaattcagaatcagtgggatgaagtacaagaacaccttcagaaccggaggcaacagttgaatgaaatgttaaaggattcaacacaatggctggaagctaaggaagaagctgagcaggtcttaggacaggccagagccaagcttgagtcatggaaggagggtccctatacagtagatgcaatccaaaagaaaatcacagaaaccaagcagttggccaaagacctccgccagtggcagacaaatgtagatgtggcaaatgacttggccctgaaacttctccgggattattctgcagatgataccagaaaagtccacatgataacagagaatatcaatgcctcttggagaagcattcataaaagggtgagtgagcgagaggctgctttggaagaaactcatagattactgcaacagttccccctggacctggaaaagtttcttgcctggcttacagaagctgaaacaactgccaatgtcctacaggatgctacccgtaaggaaaggctcctagaagactccaagggagtaaaagagctgatgaaacaatggcaagacctccaaggtgaaattgaagctcacacagatgtttatcacaacctggatgaaaacagccaaaaaatcctgagatccctggaaggttccgatgatgcagtcctgttacaaagacgtttggataacatgaacttcaagtggagtgaacttcggaaaaagtctctcaacattaggtcccatttggaagccagttctgaccagtggaagcgtctgcacctttctctgcaggaacttctggtgtggctacagctgaaagatgatgaattaagccggcaggcacctattggaggcgactttccagcagttcagaagcagaacgatgtacatagggccttcaagagggaattgaaaactaaagaacctgtaatcatgagtactcttgagactgtacgaatatttctgacagagcagcctttggaaggactagagaaactctaccaggagcccagagagctgcctcctgaggagagagcccagaatgtcactcggcttctacgaaagcaggctgaggaggtcaatactgagtgggaaaaattgaacctgcactccgctgactggcagagaaaaatagatgagacccttgaaagactccgggaacttcaagaggccacggatgagctggacctcaagctgcgccaagctgaggtgatcaagggatcctggcagcccgtgggcgatctcctcattgactctctccaagatcacctcgagaaagtcaaggcacttcgaggagaaattgcgcctctgaaagagaacgtgagccacgtcaatgaccttgctcgccagcttaccactttgggcattcagctctcaccgtataacctcagcactctggaagacctgaacaccagatggaagcttctgcaggtggccgtcgaggaccgagtcaggcagctgcatgaagcccacagggactttggtccagcatctcagcactttctttccacgtctgtccagggtccctgggagagagccatctcgccaaacaaagtgccctactatatcaaccacgagactcaaacaacttgctgggaccatcccaaaatgacagagctctaccagtctttagctgacctgaataatgtcagattctcagcttataggactgccatgaaactccgaagactgcagaaggccctttgcttggatctcttgagcctgtcagctgcatgtgatgccttggaccagcacaacctcaagcaaaatgaccagcccatggatatcctgcagattattaattgtttgaccactatttatgaccgcctggagcaagagcacaacaatttggtcaacgtccctctctgcgtggatatgtgtctgaactggctgctgaatgtttatgatacgggacgaacagggaggatccgtgtcctgtcttttaaaactggcatcatttccctgtgtaaagcacatttggaagacaagtacagataccttttcaagcaagtggcaagttcaacaggattttgtgaccagcgcaggctgggcctccttctgcatgattctatccaaattccaagacagttgggtgaagttgcatcctttgggggcagtaacattgagccaagtgtccggagctgcttccaatttgctaataataagccagagatcgaagcggccctcttcctagactggatgagactggaaccccagtccatggtgtggctgcccgtcctgcacagagtggctgctgcagaaactgccaagcatcaggccaaatgtaacatctgcaaagagtgtccaatcattggattcaggtacaggagtctaaagcactttaattatgacatctgccaaagctgctttttttctggtcgagttgcaaaaggccataaaatgcactatcccatggtggaatattgcactccgactacatcaggagaagatgttcgagactttgccaaggtactaaaaaacaaatttcgaaccaaaaggtattttgcgaagcatccccgaatgggctacctgccagtgcagactgtcttagagggggacaacatggaaactcccgttactctgatcaacttctggccagtagattctgcgcctgcctcgtcccctcagctttcacacgatgatactcattcacgcattgaacattatgctagcaggctagcagaaatggaaaacagcaatggatcttatctaaatgatagcatctctcctaatgagagcatagatgatgaacatttgttaatccagcattactgccaaagtttgaaccaggactcccccctgagccagcctcgtagtcctgcccagatcttgatttccttagagagtgaggaaagaggggagctagagagaatcctagcagatcttgaggaagaaaacaggaatctgcaagcagaatatgaccgtctaaagcagcagcacgaacataaaggcctgtccccactgccgtcccctcctgaaatgatgcccacctctccccagagtccccgggatgctgagctcattgctgaggccaagctactgcgtcaacacaaaggccgcctggaagccaggatgcaaatcctggaagaccacaataaacagctggagtcacagttacacaggctaaggcagctgctggagcaaccccaggcagaggccaaagtgaatggcacaacggtgtcctctccttctacctctctacagaggtccgacagcagtcagcctatgctgctccgagtggttggcagtcaaacttcggactccatgggtgaggaagatcttctcagtcctccccaggacacaagcacagggttagaggaggtgatggagcaactcaacaactccttccctagttcaagaggacacaatgtaggaagtcttttccacatggcagatgatttgggcagagcgatggagtccttagtatcagtcatgacagatgaagaaggagcagaataaatgttttacaactcctgattcccgcatggtttttataatattcatacaacaaagaggattagacagtaagagtttacaagaaataaatctatatttttgtgaagggtagtggtattatactgtagatttcagtagtttctaagtctgttattgttttgttaacaatggcaggttttacacgtctatgcaattgtacaaaaaagttataagaaaactacatgtaaaatcttgatagctaaataacttgccatttctttatatggaacgcattttgggttgtttaaaaatttataacagttataaagaaagattgtaaactaaagtgtgctttataaaaaaaagttgtttataaaaacccctaaaaacaaaacaaacacacacacacacacatacacacacacacacaaaactttgaggcagcgcattgttttgcatccttttggcgtgatatccatatgaaattcatggctttttctttttttgcatattaaagataagacttcctctaccaccacaccaaatgactactacacactgctcatttgagaactgtcagctgagtggggcaggcttgagttttcatttcatatatctatatgtctataagtatataaatactatagttatatagataaagagatacgaatttctatagactgactttttccattttttaaatgttcatgtcacatcctaatagaaagaaattacttctagtcagtcatccaggcttacctgcttggtctagaatggatttttcccggagccggaagccaggaggaaactacaccacactaaaacattgtctacagctccagatgtttctcattttaaacaactttccactgacaacgaaagtaaagtaaagtattggatttttttaaagggaacatgtgaatgaatacacaggacttattatatcagagtgagtaatcggttggttggttgattgattgattgattgatacattcagcttcctgctgctagcaatgccacgatttagatttaatgatgcttcagtggaaatcaatcagaaggtattctgaccttgtgaacatcagaaggtattttttaactcccaagcagtagcaggacgatgatagggctggagggctatggattcccagcccatccctgtgaaggagtaggccactctttaagtgaaggattggatgattgttcataatacataaagttctctgtaattacaactaaattattatgccctcttctcacagtcaaaaggaactgggtggtttggtttttgttgcttttttagatttattgtcccatgtgggatgagtttttaaatgccacaagacataatttaaaataaataaactttgggaaaaggtgtaaaacagtagccccatcacatttgtgatactgacaggtatcaacccagaagcccatgaactgtgtttccatcctttgcatttctctgcgagtagttccacacaggtttgtaagtaagtaagaaagaaggcaaattgattcaaatgttacaaaaaaacccttcttggtggattagacaggttaaatatataaacaaacaaacaaaaattgctcaaaaaagaggagaaaagctcaagaggaaaagctaaggactggtaggaaaaagctttactctttcatgccattttatttctttttgatttttaaatcattcattcaatagataccaccgtgtgacctataattttgcaaatctgttacctctgacatcaagtgtaattagcttttggagagtgggctgacatcaagtgtaattagcttttggagagtgggttttgtccattattaataattaattaattaacatcaaacacggcttctcatgctatttctacctcactttggttttggggtgttcctgataattgtgcacacctgagttcacagcttcaccacttgtccattgcgttattttctttttcctttataattctttctttttccttcataattttcaaaagaaaacccaaagctctaaggtaacaaattaccaaattacatgaagatttggtttttgtcttgcatttttttcctttatgtgacgctggaccttttctttacccaaggatttttaaaactcagatttaaaacaaggggttactttacatcctactaagaagtttaagtaagtaagtttcattctaaaatcagaggtaaatagagtgcataaataattttgttttaatctttttgtttttcttttagacacattagctctggagtgagtctgtcataatatttgaacaaaaattgagagctttattgctgcattttaagcataattaatttggacattatttcgtgttgtgttctttataaccaccaagtattaaactgtaaatcataatgtaactgaagcataaacatcacatggcatgttttgtcattgttttcaggtactgagttcttacttgagtatcataatatattgtgttttaacaccaacactgtaacatttacgaattatttttttaaacttcagttttactgcattttcacaacatatcagacttcaccaaatatatgccttactattgtattatagtactgctttactgtgtatctcaataaagcacgcagttatgttacaaaaaagta

SEQ ID NO: 49 - protein, 3695 aa, Homo sapiens
MEDEREDVQKKTFTKWVNAQFSKFGKQHIENLFSDLQDGRRLLDLLEGLTGQKLPKEKGSTRVHALNNVNKALRVLQNNNVDLVNIGSTDIVDGNHKLTLGLIWNIILHWQVKNVMKNIMAGLQQTNSEKILLSWVRQSTRNYPQVNVINFTTSWSDGLALNALIHSHRPDLFDWNSVVCQQSATQRLEHAFNIARYQLGIEKLLDPEDVDTTYPDKKSILMYITSLFQVLPQQVSIEAIQEVEMLPRPPKVTKEEHFQLHHQMHYSQQITVSLAQGYERTSSPKPRFKSYAYTQAAYVTTSDPTRSPFPSQHLEAPEDKSFGSSLMESEVNLDRYQTALEEVLSWLLSAEDTLQAQGEISNDVEVVKDQFHTHEGYMMDLTAHQGRVGNILQLGSKLIGTGKLSEDEETEVQEQMNLLNSRWECLRVASMEKQSNLHRVLMDLQNQKLKELNDWLTKTEERTRKMEEEPLGPDLEDLKRQVQQHKVLQEDLEQEQVRVNSLTHMVVVVDESSGDHATAALEEQLKVLGDRWANICRWTEDRWVLLQDILLKWQRLTEEQCLFSAWLSEKEDAVNKIHTTGFKDQNEMLSSLQKLAVLKADLEKKKQSMGKLYSLKQDLLSTLKNKSVTQKTEAWLDNFARCWDNLVQKLEKSTAQISQAVTTTQPSLTQTTVMETVTTVTTREQILVKHAQEELPPPPPQKKRQITVDSEIRKRLDVDITELHSWITRSEAVLQSPEFAIFRKEGNFSDLKEKVNAIEREKAEKFRKLQDASRSAQALVEQMVNEGVNADSIKQASEQLNSRWIEFCQLLSERLNWLEYQNNIIAFYNQLQQLEQMTTTAENWLKIQPTTPSEPTAIKSQLKICKDEVNRLSDLQPQIERLKIQSIALKEKGQGPMFLDADFVAFTNHFKQVFSDVQAREKELQTIFDTLPPMRYQETMSAIRTWVQQSETKLSIPQLSVTDYEIMEQRLGELQALQSSLQEQQSGLYYLSTTVKEMSKKAPSEISRKYQSEFEEIEGRWKKLSSQLVEHCQKLEEQMNKLRKIQNHIQTLKKWMAEVDVFLKEEWPALGDSEILKKQLKQCRLLVSDIQTIQPSLNSVNEGGQKIKNEAEPEFASRLETELKELNTQWDHMCQQVYARKEALKGGLEKTVSLQKDLSEMHEWMTQAEEEYLERDFEYKTPDELQKAVEEMKRAKEEAQQKEAKVKLLTESVNSVIAQAPPVAQEALKKELETLTTNYQWLCTRLNGKCKTLEEVWACWHELLSYLEKANKWLNEVEFKLKTTENIPGGAEEISEVLDSLENLMRHSEDNPNQIRILAQTLTDGGVMDELINEELETFNSRWRELHEEAVRRQKLLEQSIQSAQETEKSLHLIQESLTFIDKQLAAYIADKVDAAQMPQEAQKIQSDLTSHEISLEEMKKHNQGKEAAQRVLSQIDVAQKKLQDVSMKFRLFQKPANFEQRLQESKMILDEVKMHLPALETKSVEQEVVQSQLNHCVNLYKSLSEVKSEVEMVIKTGRQIVQKKQTENPKELDERVTALKLHYNELGAKVTERKQQLEKCLKLSRKMRKEMNVLTEWLAATDMELTKRSAVEGMPSNLDSEVAWGKATQKEIEKQKVHLKSITEVGEALKTVLGKKETLVEDKLSLLNSNWIAVTSRAEEWLNLLLEYQKHMETFDQNVDHITKWIIQADTLLDESEKKKPQQKEDVLKRLKAELNDIRPKVDSTRDQAANLMANRGDHCRKLVEPQISELNHRFAAISHRIKTGKASIPLKELEQFNSDIQKLLEPLEAEIQQGVNLKEEDFNKDMNEDNEGTVKELLQRGDNLQQRITDERKREEIKIKQQLLQTKHNALKDLRSQRRKKALEISHQWYQYKRQADDLLKCLDDIEKKLASLPEPRDERKIKEIDRELQKKKEELNAVRRQAEGLSEDGAAMAVEPTQIQLSKRWREIESKFAQFRRLNFAQIHTVREETMMVMTEDMPLEISYVPSTYLTEITHVSQALLEVEQLLNAPDLCAKDFEDLFKQEESLKNIKDSLQQSSGRIDIIHSKKTAALQSATPVERVKLQEALSQLDFQWEKVNKMYKDRQGRFDRSVEKWRRFHYDIKIFNQWLTEAEQFLRKTQIPENWEHAKYKWYLKELQDGIGQRQTVVRTLNATGEEIIQQSSKTDASILQEKLGSLNLRWQEVCKQLSDRKKRLEEQKNILSEFQRDLNEFVLWLEEADNIASIPLEPGKEQQLKEKLEQVKLLVEELPLRQGILKQLNETGGPVLVSAPISPEEQDKLENKLKQTNLQWIKVSRALPEKQGEIEAQIKDLGQLEKKLEDLEEQLNHLLLWLSPIRNQLEIYNQPNQEGPFDVKETEIAVQAKQPDVEEILSKGQHLYKEKPATQPVKRKLEDLSSEWKAVNRLLQELRAKQPDLAPGLTTIGASPTQTVTLVTQPVVTKETAISKLEMPSSLMLEVPALADFNRAWTELTDWLSLLDQVIKSQRVMVGDLEDINEMIIKQKATMQDLEQRRPQLEELITAAQNLKNKTSNQEARTIITDRIERIQNQWDEVQEHLQNRRQQLNEMLKDSTQWLEAKEEAEQVLGQARAKLESWKEGPYTVDAIQKKITETKQLAKDLRQWQTNVDVANDLALKLLRDYSADDTRKVHMITENINASWRSIHKRVSEREAALEETHRLLQQFPLDLEKFLAWLTEAETTANVLQDATRKERLLEDSKGVKELMKQWQDLQGEIEAHTDVYHNLDENSQKILRSLEGSDDAVLLQRRLDNMNFKWSELRKKSLNIRSHLEASSDQWKRLHLSLQELLVWLQLKDDELSRQAPIGGDFPAVQKQNDVHRAFKRELKTKEPVIMSTLETVRIFLTEQPLEGLEKLYQEPRELPPEERAQNVTRLLRKQAEEVNTEWEKLNLHSADWQRKIDETLERLRELQEATDELDLKLRQAEVIKGSWQPVGDLLIDSLQDHLEKVKALRGEIAPLKENVSHVNDLARQLTTLGIQLSPYNLSTLEDLNTRWKLLQVAVEDRVRQLHEAHRDFGPASQHFLSTSVQGPWERAISPNKVPYYINHETQTTCWDHPKMTELYQSLADLNNVRFSAYRTAMKLRRLQKALCLDLLSLSAACDALDQHNLKQNDQPMDILQIINCLTTIYDRLEQEHNNLVNVPLCVDMCLNWLLNVYDTGRTGRIRVLSFKTGIISLCKAHLEDKYRYLFKQVASSTGFCDQRRLGLLLHDSIQIPRQLGEVASFGGSNIEPSVRSCFQFANNKPEIEAALFLDWMRLEPQSMVWLPVLHRVAAAETAKHQAKCNICKECPIIGFRYRSLKHFNYDICQSCFFSGRVAKGHKMHYPMVEYCTPTTSGEDVRDFAKVLKNKFRTKRYFAKHPRMGYLPVQTVLEGDNMETPVTLINFWPVDSAPASSPQLSHDDTHSRIEHYASRLAEMENSNGSYLNDSISPNESIDDEHLLIQHYCQSLNQDSPLSQPRSPAQILISLESEERGELERILADLEEENRNLQAEYDRLKQQHEHKGLSPLPSPPEMMPTSPQSPRDAELIAEAKLLRQHKGRLEARMQILEDHNKQLESQLHRLRQLLEQPQAEAKVNGTTVSSPSTSLQRSDSSQPMLLRVVGSQTSDSMGEEDLLSPPQDTSTGLEEVMEQLNNSFPSSRGHNVGSLFHMADDLGRAMESLVSVMTDEEGAE

SEQ ID NO: 50 - DNA, 13800 bp, Homo sapiens
actttccccctacaggactcagatctgggaggcaattaccttcggagaaaaacgaataggaaaaactgaagtgttactttttttaaagctgctgaagtttgttggtttctcattgtttttaagcctactggagcaataaagtttgaagaacttttaccaggttttttttatcgctgccttgatatacacttttcaaaatgctttggtgggaagaagtagaggactgttatgaaagagaagatgttcaaaagaaaacattcacaaaatgggtaaatgcacaattttctaagtttgggaagcagcatattgagaacctcttcagtgacctacaggatgggaggcgcctcctagacctcctcgaaggcctgacagggcaaaaactgccaaaagaaaaaggatccacaagagttcatgccctgaacaatgtcaacaaggcactgcgggttttgcagaacaataatgttgatttagtgaatattggaagtactgacatcgtagatggaaatcataaactgactcttggtttgatttggaatataatcctccactggcaggtcaaaaatgtaatgaaaaatatcatggctggattgcaacaaaccaacagtgaaaagattctcctgagctgggtccgacaatcaactcgtaattatccacaggttaatgtaatcaacttcaccaccagctggtctgatggcctggctttgaatgctctcatccatagtcataggccagacctatttgactggaatagtgtggtttgccagcagtcagccacacaacgactggaacatgcattcaacatcgccagatatcaattaggcatagagaaactactcgatcctgaagatgttgataccacctatccagataagaagtccatcttaatgtacatcacatcactcttccaagttttgcctcaacaagtgagcattgaagccatccaggaagtggaaatgttgccaaggccacctaaagtgactaaagaagaacattttcagttacatcatcaaatgcactattctcaacagatcacggtcagtctagcacagggatatgagagaacttcttcccctaagcctcgattcaagagctatgcctacacacaggctgcttatgtcaccacctctgaccctacacggagcccatttccttcacagcatttggaagctcctgaagacaagtcatttggcagttcattgatggagagtgaagtaaacctggaccgttatcaaacagctttagaagaagtattatcgtggcttctttctgctgaggacacattgcaagcacaaggagagatttctaatgatgtggaagtggtgaaagaccagtttcatactcatgaggggtacatgatggatttgacagcccatcagggccgggttggtaatattctacaattgggaagtaagctgattggaacaggaaaattatcagaagatgaagaaactgaagtacaagagcagatgaatctcctaaattcaagatgggaatgcctcagggtagctagcatggaaaaacaaagcaatttacatagagttttaatggatctccagaatcagaaactgaaagagttgaatgactggctaacaaaaacagaagaaagaacaaggaaaatggaggaagagcctcttggacctgatcttgaagacctaaaacgccaagtacaacaacataaggtgcttcaagaagatctagaacaagaacaagtcagggtcaattctctcactcacatggtggtggtagttgatgaatctagtggagatcacgcaactgctgctttggaagaacaacttaaggtattgggagatcgatgggcaaacatctgtagatggacagaagaccgctgggttcttttacaagacatccttctcaaatggcaacgtcttactgaagaacagtgcctttttagtgcatggctttcagaaaaagaagatgcagtgaacaagattcacacaactggctttaaagatcaaaatgaaatgttatcaagtcttcaaaaactggccgttttaaaagcggatctagaaaagaaaaagcaatccatgggcaaactgtattcactcaaacaagatcttctttcaacactgaagaataagtcagtgacccagaagacggaagcatggctggataactttgcccggtgttgggataatttagtccaaaaacttgaaaagagtacagcacagatttcacaggctgtcaccaccactcagccatcactaacacagacaactgtaatggaaacagtaactacggtgaccacaagggaacagatcctggtaaagcatgctcaagaggaacttccaccaccacctccccaaaagaagaggcagattactgtggattctgaaattaggaaaaggttggatgttgatataactgaacttcacagctggattactcgctcagaagctgtgttgcagagtcctgaatttgcaatctttcggaaggaaggcaacttctcagacttaaaagaaaaagtcaatgccatagagcgagaaaaagctgagaagttcagaaaactgcaagatgccagcagatcagctcaggccctggtggaacagatggtgaatgagggtgttaatgcagatagcatcaaacaagcctcagaacaactgaacagccggtggatcgaattctgccagttgctaagtgagagacttaactggctggagtatcagaacaacatcatcgctttctataatcagctacaacaattggagcagatgacaactactgctgaaaactggttgaaaatccaacccaccaccccatcagagccaacagcaattaaaagtcagttaaaaatttgtaaggatgaagtcaaccggctatcagatcttcaacctcaaattgaacgattaaaaattcaaagcatagccctgaaagagaaaggacaaggacccatgttcctggatgcagactttgtggcctttacaaatcattttaagcaagtcttttctgatgtgcaggccagagagaaagagctacagacaatttttgacactttgccaccaatgcgctatcaggagaccatgagtgccatcaggacatgggtccagcagtcagaaaccaaactctccatacctcaacttagtgtcaccgactatgaaatcatggagcagagactcggggaattgcaggctttacaaagttctctgcaagagcaacaaagtggcctatactatctcagcaccactgtgaaagagatgtcgaagaaagcgccctctgaaattagccggaaatatcaatcagaatttgaagaaattgagggacgctggaagaagctctcctcccagctggttgagcattgtcaaaagctagaggagcaaatgaataaactccgaaaaattcagaatcacatacaaaccctgaagaaatggatggctgaagttgatgtttttctgaaggaggaatggcctgcccttggggattcagaaattctaaaaaagcagctgaaacagtgcagacttttagtcagtgatattcagacaattcagcccagtctaaacagtgtcaatgaaggtgggcagaagataaagaatgaagcagagccagagtttgcttcgagacttgagacagaactcaaagaacttaacactcagtgggatcacatgtgccaacaggtctatgccagaaaggaggccttgaagggaggtttggagaaaactgtaagcctccagaaagatctatcagagatgcacgaatggatgacacaagctgaagaagagtatcttgagagagattttgaatataaaactccagatgaattacagaaagcagttgaagagatgaagagagctaaagaagaggcccaacaaaaagaagcgaaagtgaaactccttactgagtctgtaaatagtgtcatagctcaagctccacctgtagcacaagaggccttaaaaaaggaacttgaaactctaaccaccaactaccagtggctctgcactaggctgaatgggaaatgcaagactttggaagaagtttgggcatgttggcatgagttattgtcatacttggagaaagcaaacaagtggctaaatgaagtagaatttaaacttaaaaccactgaaaacattcctggcggagctgaggaaatctctgaggtgctagattcacttgaaaatttgatgcgacattcagaggataacccaaatcagattcgcatattggcacagaccctaacagatggcggagtcatggatgagctaatcaatgaggaacttgagacatttaattctcgttggagggaactacatgaagaggctgtaaggaggcaaaagttgcttgaacagagcatccagtctgcccaggagactgaaaaatccttacacttaatccaggagtccctcacattcattgacaagcagttggcagcttatattgcagacaaggtggacgcagctcaaatgcctcaggaagcccagaaaatccaatctgatttgacaagtcatgagatcagtttagaagaaatgaagaaacataatcaggggaaggaggctgcccaaagagtcctgtctcagattgatgttgcacagaaaaaattacaagatgtctccatgaagtttcgattattccagaaaccagccaattttgagcagcgtctacaagaaagtaagatgattttagatgaagtgaagatgcacttgcctgcattggaaacaaagagtgtggaacaggaagtagtacagtcacagctaaatcattgtgtgaacttgtataaaagtctgagtgaagtgaagtctgaagtggaaatggtgataaagactggacgtcagattgtacagaaaaagcagacggaaaatcccaaagaacttgatgaaagagtaacagctttgaaattgcattataatgagctgggagcaaaggtaacagaaagaaagcaacagttggagaaatgcttgaaattgtcccgtaagatgcgaaaggaaatgaatgtcttgacagaatggctggcagctacagatatggaattgacaaagagatcagcagttgaaggaatgcctagtaatttggattctgaagttgcctggggaaaggctactcaaaaagagattgagaaacagaaggtgcacctgaagagtatcacagaggtaggagaggccttgaaaacagttttgggcaagaaggagacgttggtggaagataaactcagtcttctgaatagtaactggatagctgtcacctcccgagcagaagagtggttaaatcttttgttggaataccagaaacacatggaaacttttgaccagaatgtggaccacatcacaaagtggatcattcaggctgacacacttttggatgaatcagagaaaaagaaaccccagcaaaaagaagacgtgcttaagcgtttaaaggcagaactgaatgacatacgcccaaaggtggactctacacgtgaccaagcagcaaacttgatggcaaaccgcggtgaccactgcaggaaattagtagagccccaaatctcagagctcaaccatcgatttgcagccatttcacacagaattaagactggaaagaatgaagacaatgagggtactgtaaaagaattgttgcaaagaggagacaacttacaacaaagaatcacagatgagagaaagcgagaggaaataaagataaaacagcagctgttacagacaaaacataatgctctcaaggatttgaggtctcaaagaagaaaaaaggctctagaaatttctcatcagtggtatcagtacaagaggcaggctgatgatctcctgaaatgcttggatgacattgaaaaaaaattagccagcctacctgagcccagagatgaaaggaaaataaaggaaattgatcgggaattgcagaagaagaaagaggagctgaatgcagtgcgtaggcaagctgagggcttgtctgaggatggggccgcaatggcagtggagccaactcagatccagctcagcaagcgctggcgggaaattgagagcaaatttgctcagtttcgaagactcaactttgcacaaattcacactgtccgtgaagaaacgatgatggtgatgactgaagacatgcctttggaaatttcttatgtgccttctacttatttgactgaaatcactcatgtctcacaagccctattagaagtggaacaacttctcaatgctcctgacctctgtgctaaggactttgaagatctctttaagcaagaggagtctctgaagaatataaaagatagtctacaacaaagctcaggtcggattgacattattcatagcaagaagacagcagcattgcaaagtgcaacgcctgtggaaagggtgaagctacaggaagctctctcccagcttgatttccaatgggaaaaagttaacaaaatgtacaaggaccgacaagggcgatttgacagatctgttgagaaatggcggcgttttcattatgatataaagatatttaatcagtggctaacagaagctgaacagtttctcagaaagacacaaattcctgagaattgggaacatgctaaatacaaatggtatcttaaggaactccaggatggcattgggcagcggcaaactgttgtcagaacattgaatgcaactggggaagaaataattcagcaatcctcaaaaacagatgccagtattctacaggaaaaattgggaagcctgaatctgcggtggcaggaggtctgcaaacagctgtcagacagaaaaaagaggctagaagaacaaaagaatatcttgtcagaatttcaaagagatttaaatgaatttgttttatggttggaggaagcagataacattgctagtatcccacttgaacctggaaaagagcagcaactaaaagaaaagcttgagcaagtcaagttactggtggaagagttgcccctgcgccagggaattctcaaacaattaaatgaaactggaggacccgtgcttgtaagtgctcccataagcccagaagagcaagataaacttgaaaataagctcaagcagacaaatctccagtggataaaggtttccagagctttacctgagaaacaaggagaaattgaagctcaaataaaagaccttgggcagcttgaaaaaaagcttgaagaccttgaagagcagttaaatcatctgctgctgtggttatctcctattaggaatcagttggaaatttataaccaaccaaaccaagaaggaccatttgacgttaaggaaactgaaatagcagttcaagctaaacaaccggatgtggaagagattttgtctaaagggcagcatttgtacaaggaaaaaccagccactcagccagtgaagaggaagttagaagatctgagctctgagtggaaggcggtaaaccgtttacttcaagagctgagggcaaagcagcctgacctagctcctggactgaccactattggagcctctcctactcagactgttactctggtgacacaacctgtggttactaaggaaactgccatctccaaactagaaatgccatcttccttgatgttggaggtacctgctctggcagatttcaaccgggcttggacagaacttaccgactggctttctctgcttgatcaagttataaaatcacagagggtgatggtgggtgaccttgaggatatcaacgagatgatcatcaagcagaaggcaacaatgcaggatttggaacagaggcgtccccagttggaagaactcattaccgctgcccaaaatttgaaaaacaagaccagcaatcaagaggctagaacaatcattacggatcgaattgaaagaattcagaatcagtgggatgaagtacaagaacaccttcagaaccggaggcaacagttgaatgaaatgttaaaggattcaacacaatggctggaagctaaggaagaagctgagcaggtcttaggacaggccagagccaagcttgagtcatggaaggagggtccctatacagtagatgcaatccaaaagaaaatcacagaaaccaagcagttggccaaagacctccgccagtggcagacaaatgtagatgtggcaaatgacttggccctgaaacttctccgggattattctgcagatgataccagaaaagtccacatgataacagagaatatcaatgcctcttggagaagcattcataaaagggtgagtgagcgagaggctgctttggaagaaactcatagattactgcaacagttccccctggacctggaaaagtttcttgcctggcttacagaagctgaaacaactgccaatgtcctacaggatgctacccgtaaggaaaggctcctagaagactccaagggagtaaaagagctgatgaaacaatggcaagacctccaaggtgaaattgaagctcacacagatgtttatcacaacctggatgaaaacagccaaaaaatcctgagatccctggaaggttccgatgatgcagtcctgttacaaagacgtttggataacatgaacttcaagtggagtgaacttcggaaaaagtctctcaacattaggtcccatttggaagccagttctgaccagtggaagcgtctgcacctttctctgcaggaacttctggtgtggctacagctgaaagatgatgaattaagccggcaggcacctattggaggcgactttccagcagttcagaagcagaacgatgtacatagggccttcaagagggaattgaaaactaaagaacctgtaatcatgagtactcttgagactgtacgaatatttctgacagagcagcctttggaaggactagagaaactctaccaggagcccagagagctgcctcctgaggagagagcccagaatgtcactcggcttctacgaaagcaggctgaggaggtcaatactgagtgggaaaaattgaacctgcactccgctgactggcagagaaaaatagatgagacccttgaaagactccgggaacttcaagaggccacggatgagctggacctcaagctgcgccaagctgaggtgatcaagggatcctggcagcccgtgggcgatctcctcattgactctctccaagatcacctcgagaaagtcaaggcacttcgaggagaaattgcgcctctgaaagagaacgtgagccacgtcaatgaccttgctcgccagcttaccactttgggcattcagctctcaccgtataacctcagcactctggaagacctgaacaccagatggaagcttctgcaggtggccgtcgaggaccgagtcaggcagctgcatgaagcccacagggactttggtccagcatctcagcactttctttccacgtctgtccagggtccctgggagagagccatctcgccaaacaaagtgccctactatatcaaccacgagactcaaacaacttgctgggaccatcccaaaatgacagagctctaccagtctttagctgacctgaataatgtcagattctcagcttataggactgccatgaaactccgaagactgcagaaggccctttgcttggatctcttgagcctgtcagctgcatgtgatgccttggaccagcacaacctcaagcaaaatgaccagcccatggatatcctgcagattattaattgtttgaccactatttatgaccgcctggagcaagagcacaacaatttggtcaacgtccctctctgcgtggatatgtgtctgaactggctgctgaatgtttatgatacgggacgaacagggaggatccgtgtcctgtcttttaaaactggcatcatttccctgtgtaaagcacatttggaagacaagtacagataccttttcaagcaagtggcaagttcaacaggattttgtgaccagcgcaggctgggcctccttctgcatgattctatccaaattccaagacagttgggtgaagttgcatcctttgggggcagtaacattgagccaagtgtccggagctgcttccaatttgctaataataagccagagatcgaagcggccctcttcctagactggatgagactggaaccccagtccatggtgtggctgcccgtcctgcacagagtggctgctgcagaaactgccaagcatcaggccaaatgtaacatctgcaaagagtgtccaatcattggattcaggtacaggagtctaaagcactttaattatgacatctgccaaagctgctttttttctggtcgagttgcaaaaggccataaaatgcactatcccatggtggaatattgcactccgactacatcaggagaagatgttcgagactttgccaaggtactaaaaaacaaatttcgaaccaaaaggtattttgcgaagcatccccgaatgggctacctgccagtgcagactgtcttagagggggacaacatggaaactcccgttactctgatcaacttctggccagtagattctgcgcctgcctcgtcccctcagctttcacacgatgatactcattcacgcattgaacattatgctagcaggctagcagaaatggaaaacagcaatggatcttatctaaatgatagcatctctcctaatgagagcatagatgatgaacatttgttaatccagcattactgccaaagtttgaaccaggactcccccctgagccagcctcgtagtcctgcccagatcttgatttccttagagagtgaggaaagaggggagctagagagaatcctagcagatcttgaggaagaaaacaggaatctgcaagcagaatatgaccgtctaaagcagcagcacgaacataaaggcctgtccccactgccgtcccctcctgaaatgatgcccacctctccccagagtccccgggatgctgagctcattgctgaggccaagctactgcgtcaacacaaaggccgcctggaagccaggatgcaaatcctggaagaccacaataaacagctggagtcacagttacacaggctaaggcagctgctggagcaaccccaggcagaggccaaagtgaatggcacaacggtgtcctctccttctacctctctacagaggtccgacagcagtcagcctatgctgctccgagtggttggcagtcaaacttcggactccatgggtgaggaagatcttctcagtcctccccaggacacaagcacagggttagaggaggtgatggagcaactcaacaactccttccctagttcaagaggacacaatgtaggaagtcttttccacatggcagatgatttgggcagagcgatggagtccttagtatcagtcatgacagatgaagaaggagcagaataaatgttttacaactcctgattcccgcatggtttttataatattcatacaacaaagaggattagacagtaagagtttacaagaaataaatctatatttttgtgaagggtagtggtattatactgtagatttcagtagtttctaagtctgttattgttttgttaacaatggcaggttttacacgtctatgcaattgtacaaaaaagttataagaaaactacatgtaaaatcttgatagctaaataacttgccatttctttatatggaacgcattttgggttgtttaaaaatttataacagttataaagaaagattgtaaactaaagtgtgctttataaaaaaaagttgtttataaaaacccctaaaaacaaaacaaacacacacacacacacatacacacacacacacaaaactttgaggcagcgcattgttttgcatccttttggcgtgatatccatatgaaattcatggctttttctttttttgcatattaaagataagacttcctctaccaccacaccaaatgactactacacactgctcatttgagaactgtcagctgagtggggcaggcttgagttttcatttcatatatctatatgtctataagtatataaatactatagttatatagataaagagatacgaatttctatagactgactttttccattttttaaatgttcatgtcacatcctaatagaaagaaattacttctagtcagtcatccaggcttacctgcttggtctagaatggatttttcccggagccggaagccaggaggaaactacaccacactaaaacattgtctacagctccagatgtttctcattttaaacaactttccactgacaacgaaagtaaagtaaagtattggatttttttaaagggaacatgtgaatgaatacacaggacttattatatcagagtgagtaatcggttggttggttgattgattgattgattgatacattcagcttcctgctgctagcaatgccacgatttagatttaatgatgcttcagtggaaatcaatcagaaggtattctgaccttgtgaacatcagaaggtattttttaactcccaagcagtagcaggacgatgatagggctggagggctatggattcccagcccatccctgtgaaggagtaggccactctttaagtgaaggattggatgattgttcataatacataaagttctctgtaattacaactaaattattatgccctcttctcacagtcaaaaggaactgggtggtttggtttttgttgcttttttagatttattgtcccatgtgggatgagtttttaaatgccacaagacataatttaaaataaataaactttgggaaaaggtgtaaaacagtagccccatcacatttgtgatactgacaggtatcaacccagaagcccatgaactgtgtttccatcctttgcatttctctgcgagtagttccacacaggtttgtaagtaagtaagaaagaaggcaaattgattcaaatgttacaaaaaaacccttcttggtggattagacaggttaaatatataaacaaacaaacaaaaattgctcaaaaaagaggagaaaagctcaagaggaaaagctaaggactggtaggaaaaagctttactctttcatgccattttatttctttttgatttttaaatcattcattcaatagataccaccgtgtgacctataattttgcaaatctgttacctctgacatcaagtgtaattagcttttggagagtgggctgacatcaagtgtaattagcttttggagagtgggttttgtccattattaataattaattaattaacatcaaacacggcttctcatgctatttctacctcactttggttttggggtgttcctgataattgtgcacacctgagttcacagcttcaccacttgtccattgcgttattttctttttcctttataattctttctttttccttcataattttcaaaagaaaacccaaagctctaaggtaacaaattaccaaattacatgaagatttggtttttgtcttgcatttttttcctttatgtgacgctggaccttttctttacccaaggatttttaaaactcagatttaaaacaaggggttactttacatcctactaagaagtttaagtaagtaagtttcattctaaaatcagaggtaaatagagtgcataaataattttgttttaatctttttgtttttcttttagacacattagctctggagtgagtctgtcataatatttgaacaaaaattgagagctttattgctgcattttaagcataattaatttggacattatttcgtgttgtgttctttataaccaccaagtattaaactgtaaatcataatgtaactgaagcataaacatcacatggcatgttttgtcattgttttcaggtactgagttcttacttgagtatcataatatattgtgttttaacaccaacactgtaacatttacgaattatttttttaaacttcagttttactgcattttcacaacatatcagacttcaccaaatatatgccttactattgtattatagtactgctttactgtgtatctcaataaagcacgcagttatgttacaaaaaagta

SEQ ID NO: 51 - protein, 3662 aa, Homo sapiens
MLWWEEVEDCYEREDVQKKTFTKWVNAQFSKFGKQHIENLFSDLQDGRRLLDLLEGLTGQKLPKEKGSTRVHALNNVNKALRVLQNNNVDLVNIGSTDIVDGNHKLTLGLIWNIILHWQVKNVMKNIMAGLQQTNSEKILLSWVRQSTRNYPQVNVINFTTSWSDGLALNALIHSHRPDLFDWNSVVCQQSATQRLEHAFNIARYQLGIEKLLDPEDVDTTYPDKKSILMYITSLFQVLPQQVSIEAIQEVEMLPRPPKVTKEEHFQLHHQMHYSQQITVSLAQGYERTSSPKPRFKSYAYTQAAYVTTSDPTRSPFPSQHLEAPEDKSFGSSLMESEVNLDRYQTALEEVLSWLLSAEDTLQAQGEISNDVEVVKDQFHTHEGYMMDLTAHQGRVGNILQLGSKLIGTGKLSEDEETEVQEQMNLLNSRWECLRVASMEKQSNLHRVLMDLQNQKLKELNDWLTKTEERTRKMEEEPLGPDLEDLKRQVQQHKVLQEDLEQEQVRVNSLTHMVVVVDESSGDHATAALEEQLKVLGDRWANICRWTEDRWVLLQDILLKWQRLTEEQCLFSAWLSEKEDAVNKIHTTGFKDQNEMLSSLQKLAVLKADLEKKKQSMGKLYSLKQDLLSTLKNKSVTQKTEAWLDNFARCWDNLVQKLEKSTAQISQAVTTTQPSLTQTTVMETVTTVTTREQILVKHAQEELPPPPPQKKRQITVDSEIRKRLDVDITELHSWITRSEAVLQSPEFAIFRKEGNFSDLKEKVNAIEREKAEKFRKLQDASRSAQALVEQMVNEGVNADSIKQASEQLNSRWIEFCQLLSERLNWLEYQNNIIAFYNQLQQLEQMTTTAENWLKIQPTTPSEPTAIKSQLKICKDEVNRLSDLQPQIERLKIQSIALKEKGQGPMFLDADFVAFTNHFKQVFSDVQAREKELQTIFDTLPPMRYQETMSAIRTWVQQSETKLSIPQLSVTDYEIMEQRLGELQALQSSLQEQQSGLYYLSTTVKEMSKKAPSEISRKYQSEFEEIEGRWKKLSSQLVEHCQKLEEQMNKLRKIQNHIQTLKKWMAEVDVFLKEEWPALGDSEILKKQLKQCRLLVSDIQTIQPSLNSVNEGGQKIKNEAEPEFASRLETELKELNTQWDHMCQQVYARKEALKGGLEKTVSLQKDLSEMHEWMTQAEEEYLERDFEYKTPDELQKAVEEMKRAKEEAQQKEAKVKLLTESVNSVIAQAPPVAQEALKKELETLTTNYQWLCTRLNGKCKTLEEVWACWHELLSYLEKANKWLNEVEFKLKTTENIPGGAEEISEVLDSLENLMRHSEDNPNQIRILAQTLTDGGVMDELINEELETFNSRWRELHEEAVRRQKLLEQSIQSAQETEKSLHLIQESLTFIDKQLAAYIADKVDAAQMPQEAQKIQSDLTSHEISLEEMKKHNQGKEAAQRVLSQIDVAQKKLQDVSMKFRLFQKPANFEQRLQESKMILDEVKMHLPALETKSVEQEVVQSQLNHCVNLYKSLSEVKSEVEMVIKTGRQIVQKKQTENPKELDERVTALKLHYNELGAKVTERKQQLEKCLKLSRKMRKEMNVLTEWLAATDMELTKRSAVEGMPSNLDSEVAWGKATQKEIEKQKVHLKSITEVGEALKTVLGKKETLVEDKLSLLNSNWIAVTSRAEEWLNLLLEYQKHMETFDQNVDHITKWIIQADTLLDESEKKKPQQKEDVLKRLKAELNDIRPKVDSTRDQAANLMANRGDHCRKLVEPQISELNHRFAAISHRIKTGKNEDNEGTVKELLQRGDNLQQRITDERKREEIKIKQQLLQTKHNALKDLRSQRRKKALEISHQWYQYKRQADDLLKCLDDIEKKLASLPEPRDERKIKEIDRELQKKKEELNAVRRQAEGLSEDGAAMAVEPTQIQLSKRWREIESKFAQFRRLNFAQIHTVREETMMVMTEDMPLEISYVPSTYLTEITHVSQALLEVEQLLNAPDLCAKDFEDLFKQEESLKNIKDSLQQSSGRIDIIHSKKTAALQSATPVERVKLQEALSQLDFQWEKVNKMYKDRQGRFDRSVEKWRRFHYDIKIFNQWLTEAEQFLRKTQIPENWEHAKYKWYLKELQDGIGQRQTVVRTLNATGEEIIQQSSKTDASILQEKLGSLNLRWQEVCKQLSDRKKRLEEQKNILSEFQRDLNEFVLWLEEADNIASIPLEPGKEQQLKEKLEQVKLLVEELPLRQGILKQLNETGGPVLVSAPISPEEQDKLENKLKQTNLQWIKVSRALPEKQGEIEAQIKDLGQLEKKLEDLEEQLNHLLLWLSPIRNQLEIYNQPNQEGPFDVKETEIAVQAKQPDVEEILSKGQHLYKEKPATQPVKRKLEDLSSEWKAVNRLLQELRAKQPDLAPGLTTIGASPTQTVTLVTQPVVTKETAISKLEMPSSLMLEVPALADFNRAWTELTDWLSLLDQVIKSQRVMVGDLEDINEMIIKQKATMQDLEQRRPQLEELITAAQNLKNKTSNQEARTIITDRIERIQNQWDEVQEHLQNRRQQLNEMLKDSTQWLEAKEEAEQVLGQARAKLESWKEGPYTVDAIQKKITETKQLAKDLRQWQTNVDVANDLALKLLRDYSADDTRKVHMITENINASWRSIHKRVSEREAALEETHRLLQQFPLDLEKFLAWLTEAETTANVLQDATRKERLLEDSKGVKELMKQWQDLQGEIEAHTDVYHNLDENSQKILRSLEGSDDAVLLQRRLDNMNFKWSELRKKSLNIRSHLEASSDQWKRLHLSLQELLVWLQLKDDELSRQAPIGGDFPAVQKQNDVHRAFKRELKTKEPVIMSTLETVRIFLTEQPLEGLEKLYQEPRELPPEERAQNVTRLLRKQAEEVNTEWEKLNLHSADWQRKIDETLERLRELQEATDELDLKLRQAEVIKGSWQPVGDLLIDSLQDHLEKVKALRGEIAPLKENVSHVNDLARQLTTLGIQLSPYNLSTLEDLNTRWKLLQVAVEDRVRQLHEAHRDFGPASQHFLSTSVQGPWERAISPNKVPYYINHETQTTCWDHPKMTELYQSLADLNNVRFSAYRTAMKLRRLQKALCLDLLSLSAACDALDQHNLKQNDQPMDILQIINCLTTIYDRLEQEHNNLVNVPLCVDMCLNWLLNVYDTGRTGRIRVLSFKTGIISLCKAHLEDKYRYLFKQVASSTGFCDQRRLGLLLHDSIQIPRQLGEVASFGGSNIEPSVRSCFQFANNKPEIEAALFLDWMRLEPQSMVWLPVLHRVAAAETAKHQAKCNICKECPIIGFRYRSLKHFNYDICQSCFFSGRVAKGHKMHYPMVEYCTPTTSGEDVRDFAKVLKNKFRTKRYFAKHPRMGYLPVQTVLEGDNMETPVTLINFWPVDSAPASSPQLSHDDTHSRIEHYASRLAEMENSNGSYLNDSISPNESIDDEHLLIQHYCQSLNQDSPLSQPRSPAQILISLESEERGELERILADLEEENRNLQAEYDRLKQQHEHKGLSPLPSPPEMMPTSPQSPRDAELIAEAKLLRQHKGRLEARMQILEDHNKQLESQLHRLRQLLEQPQAEAKVNGTTVSSPSTSLQRSDSSQPMLLRVVGSQTSDSMGEEDLLSPPQDTSTGLEEVMEQLNNSFPSSRGHNVGSLFHMADDLGRAMESLVSVMTDEEGAE

SEQ ID NO: 52 - DNA, 13785 bp, Homo sapiens
actttccccctacaggactcagatctgggaggcaattaccttcggagaaaaacgaataggaaaaactgaagtgttactttttttaaagctgctgaagtttgttggtttctcattgtttttaagcctactggagcaataaagtttgaagaacttttaccaggttttttttatcgctgccttgatatacacttttcaaaatgctttggtgggaagaagtagaggactgttatgaaagagaagatgttcaaaagaaaacattcacaaaatgggtaaatgcacaattttctaagtttgggaagcagcatattgagaacctcttcagtgacctacaggatgggaggcgcctcctagacctcctcgaaggcctgacagggcaaaaactgccaaaagaaaaaggatccacaagagttcatgccctgaacaatgtcaacaaggcactgcgggttttgcagaacaataatgttgatttagtgaatattggaagtactgacatcgtagatggaaatcataaactgactcttggtttgatttggaatataatcctccactggcaggtcaaaaatgtaatgaaaaatatcatggctggattgcaacaaaccaacagtgaaaagattctcctgagctgggtccgacaatcaactcgtaattatccacaggttaatgtaatcaacttcaccaccagctggtctgatggcctggctttgaatgctctcatccatagtcataggccagacctatttgactggaatagtgtggtttgccagcagtcagccacacaacgactggaacatgcattcaacatcgccagatatcaattaggcatagagaaactactcgatcctgaagatgttgataccacctatccagataagaagtccatcttaatgtacatcacatcactcttccaagttttgcctcaacaagtgagcattgaagccatccaggaagtggaaatgttgccaaggccacctaaagtgactaaagaagaacattttcagttacatcatcaaatgcactattctcaacagatcacggtcagtctagcacagggatatgagagaacttcttcccctaagcctcgattcaagagctatgcctacacacaggctgcttatgtcaccacctctgaccctacacggagcccatttccttcacagcatttggaagctcctgaagacaagtcatttggcagttcattgatggagagtgaagtaaacctggaccgttatcaaacagctttagaagaagtattatcgtggcttctttctgctgaggacacattgcaagcacaaggagagatttctaatgatgtggaagtggtgaaagaccagtttcatactcatgaggggtacatgatggatttgacagcccatcagggccgggttggtaatattctacaattgggaagtaagctgattggaacaggaaaattatcagaagatgaagaaactgaagtacaagagcagatgaatctcctaaattcaagatgggaatgcctcagggtagctagcatggaaaaacaaagcaatttacatagagttttaatggatctccagaatcagaaactgaaagagttgaatgactggctaacaaaaacagaagaaagaacaaggaaaatggaggaagagcctcttggacctgatcttgaagacctaaaacgccaagtacaacaacataaggtgcttcaagaagatctagaacaagaacaagtcagggtcaattctctcactcacatggtggtggtagttgatgaatctagtggagatcacgcaactgctgctttggaagaacaacttaaggtattgggagatcgatgggcaaacatctgtagatggacagaagaccgctgggttcttttacaagacatccttctcaaatggcaacgtcttactgaagaacagtgcctttttagtgcatggctttcagaaaaagaagatgcagtgaacaagattcacacaactggctttaaagatcaaaatgaaatgttatcaagtcttcaaaaactggccgttttaaaagcggatctagaaaagaaaaagcaatccatgggcaaactgtattcactcaaacaagatcttctttcaacactgaagaataagtcagtgacccagaagacggaagcatggctggataactttgcccggtgttgggataatttagtccaaaaacttgaaaagagtacagcacagatttcacaggctgtcaccaccactcagccatcactaacacagacaactgtaatggaaacagtaactacggtgaccacaagggaacagatcctggtaaagcatgctcaagaggaacttccaccaccacctccccaaaagaagaggcagattactgtggattctgaaattaggaaaaggttggatgttgatataactgaacttcacagctggattactcgctcagaagctgtgttgcagagtcctgaatttgcaatctttcggaaggaaggcaacttctcagacttaaaagaaaaagtcaatgccatagagcgagaaaaagctgagaagttcagaaaactgcaagatgccagcagatcagctcaggccctggtggaacagatggtgaatgagggtgttaatgcagatagcatcaaacaagcctcagaacaactgaacagccggtggatcgaattctgccagttgctaagtgagagacttaactggctggagtatcagaacaacatcatcgctttctataatcagctacaacaattggagcagatgacaactactgctgaaaactggttgaaaatccaacccaccaccccatcagagccaacagcaattaaaagtcagttaaaaatttgtaaggatgaagtcaaccggctatcagatcttcaacctcaaattgaacgattaaaaattcaaagcatagccctgaaagagaaaggacaaggacccatgttcctggatgcagactttgtggcctttacaaatcattttaagcaagtcttttctgatgtgcaggccagagagaaagagctacagacaatttttgacactttgccaccaatgcgctatcaggagaccatgagtgccatcaggacatgggtccagcagtcagaaaccaaactctccatacctcaacttagtgtcaccgactatgaaatcatggagcagagactcggggaattgcaggctttacaaagttctctgcaagagcaacaaagtggcctatactatctcagcaccactgtgaaagagatgtcgaagaaagcgccctctgaaattagccggaaatatcaatcagaatttgaagaaattgagggacgctggaagaagctctcctcccagctggttgagcattgtcaaaagctagaggagcaaatgaataaactccgaaaaattcagaatcacatacaaaccctgaagaaatggatggctgaagttgatgtttttctgaaggaggaatggcctgcccttggggattcagaaattctaaaaaagcagctgaaacagtgcagacttttagtcagtgatattcagacaattcagcccagtctaaacagtgtcaatgaaggtgggcagaagataaagaatgaagcagagccagagtttgcttcgagacttgagacagaactcaaagaacttaacactcagtgggatcacatgtgccaacaggtctatgccagaaaggaggccttgaagggaggtttggagaaaactgtaagcctccagaaagatctatcagagatgcacgaatggatgacacaagctgaagaagagtatcttgagagagattttgaatataaaactccagatgaattacagaaagcagttgaagagatgaagagagctaaagaagaggcccaacaaaaagaagcgaaagtgaaactccttactgagtctgtaaatagtgtcatagctcaagctccacctgtagcacaagaggccttaaaaaaggaacttgaaactctaaccaccaactaccagtggctctgcactaggctgaatgggaaatgcaagactttggaagaagtttgggcatgttggcatgagttattgtcatacttggagaaagcaaacaagtggctaaatgaagtagaatttaaacttaaaaccactgaaaacattcctggcggagctgaggaaatctctgaggtgctagattcacttgaaaatttgatgcgacattcagaggataacccaaatcagattcgcatattggcacagaccctaacagatggcggagtcatggatgagctaatcaatgaggaacttgagacatttaattctcgttggagggaactacatgaagaggctgtaaggaggcaaaagttgcttgaacagagcatccagtctgcccaggagactgaaaaatccttacacttaatccaggagtccctcacattcattgacaagcagttggcagcttatattgcagacaaggtggacgcagctcaaatgcctcaggaagcccagaaaatccaatctgatttgacaagtcatgagatcagtttagaagaaatgaagaaacataatcaggggaaggaggctgcccaaagagtcctgtctcagattgatgttgcacagaaaaaattacaagatgtctccatgaagtttcgattattccagaaaccagccaattttgagcagcgtctacaagaaagtaagatgattttagatgaagtgaagatgcacttgcctgcattggaaacaaagagtgtggaacaggaagtagtacagtcacagctaaatcattgtgtgaacttgtataaaagtctgagtgaagtgaagtctgaagtggaaatggtgataaagactggacgtcagattgtacagaaaaagcagacggaaaatcccaaagaacttgatgaaagagtaacagctttgaaattgcattataatgagctgggagcaaaggtaacagaaagaaagcaacagttggagaaatgcttgaaattgtcccgtaagatgcgaaaggaaatgaatgtcttgacagaatggctggcagctacagatatggaattgacaaagagatcagcagttgaaggaatgcctagtaatttggattctgaagttgcctggggaaaggctactcaaaaagagattgagaaacagaaggtgcacctgaagagtatcacagaggtaggagaggccttgaaaacagttttgggcaagaaggagacgttggtggaagataaactcagtcttctgaatagtaactggatagctgtcacctcccgagcagaagagtggttaaatcttttgttggaataccagaaacacatggaaacttttgaccagaatgtggaccacatcacaaagtggatcattcaggctgacacacttttggatgaatcagagaaaaagaaaccccagcaaaaagaagacgtgcttaagcgtttaaaggcagaactgaatgacatacgcccaaaggtggactctacacgtgaccaagcagcaaacttgatggcaaaccgcggtgaccactgcaggaaattagtagagccccaaatctcagagctcaaccatcgatttgcagccatttcacacagaattaagactggaaaggcctccattcctttgaaggaattggagcagtttaactcagatatacaaaaattgcttgaaccactggaggctgaaattcagcagggggtgaatctgaaagaggaagacttcaataaagatatggatttgaggtctcaaagaagaaaaaaggctctagaaatttctcatcagtggtatcagtacaagaggcaggctgatgatctcctgaaatgcttggatgacattgaaaaaaaattagccagcctacctgagcccagagatgaaaggaaaataaaggaaattgatcgggaattgcagaagaagaaagaggagctgaatgcagtgcgtaggcaagctgagggcttgtctgaggatggggccgcaatggcagtggagccaactcagatccagctcagcaagcgctggcgggaaattgagagcaaatttgctcagtttcgaagactcaactttgcacaaattcacactgtccgtgaagaaacgatgatggtgatgactgaagacatgcctttggaaatttcttatgtgccttctacttatttgactgaaatcactcatgtctcacaagccctattagaagtggaacaacttctcaatgctcctgacctctgtgctaaggactttgaagatctctttaagcaagaggagtctctgaagaatataaaagatagtctacaacaaagctcaggtcggattgacattattcatagcaagaagacagcagcattgcaaagtgcaacgcctgtggaaagggtgaagctacaggaagctctctcccagcttgatttccaatgggaaaaagttaacaaaatgtacaaggaccgacaagggcgatttgacagatctgttgagaaatggcggcgttttcattatgatataaagatatttaatcagtggctaacagaagctgaacagtttctcagaaagacacaaattcctgagaattgggaacatgctaaatacaaatggtatcttaaggaactccaggatggcattgggcagcggcaaactgttgtcagaacattgaatgcaactggggaagaaataattcagcaatcctcaaaaacagatgccagtattctacaggaaaaattgggaagcctgaatctgcggtggcaggaggtctgcaaacagctgtcagacagaaaaaagaggctagaagaacaaaagaatatcttgtcagaatttcaaagagatttaaatgaatttgttttatggttggaggaagcagataacattgctagtatcccacttgaacctggaaaagagcagcaactaaaagaaaagcttgagcaagtcaagttactggtggaagagttgcccctgcgccagggaattctcaaacaattaaatgaaactggaggacccgtgcttgtaagtgctcccataagcccagaagagcaagataaacttgaaaataagctcaagcagacaaatctccagtggataaaggtttccagagctttacctgagaaacaaggagaaattgaagctcaaataaaagaccttgggcagcttgaaaaaaagcttgaagaccttgaagagcagttaaatcatctgctgctgtggttatctcctattaggaatcagttggaaatttataaccaaccaaaccaagaaggaccatttgacgttaaggaaactgaaatagcagttcaagctaaacaaccggatgtggaagagattttgtctaaagggcagcatttgtacaaggaaaaaccagccactcagccagtgaagaggaagttagaagatctgagctctgagtggaaggcggtaaaccgtttacttcaagagctgagggcaaagcagcctgacctagctcctggactgaccactattggagcctctcctactcagactgttactctggtgacacaacctgtggttactaaggaaactgccatctccaaactagaaatgccatcttccttgatgttggaggtacctgctctggcagatttcaaccgggcttggacagaacttaccgactggctttctctgcttgatcaagttataaaatcacagagggtgatggtgggtgaccttgaggatatcaacgagatgatcatcaagcagaaggcaacaatgcaggatttggaacagaggcgtccccagttggaagaactcattaccgctgcccaaaatttgaaaaacaagaccagcaatcaagaggctagaacaatcattacggatcgaattgaaagaattcagaatcagtgggatgaagtacaagaacaccttcagaaccggaggcaacagttgaatgaaatgttaaaggattcaacacaatggctggaagctaaggaagaagctgagcaggtcttaggacaggccagagccaagcttgagtcatggaaggagggtccctatacagtagatgcaatccaaaagaaaatcacagaaaccaagcagttggccaaagacctccgccagtggcagacaaatgtagatgtggcaaatgacttggccctgaaacttctccgggattattctgcagatgataccagaaaagtccacatgataacagagaatatcaatgcctcttggagaagcattcataaaagggtgagtgagcgagaggctgctttggaagaaactcatagattactgcaacagttccccctggacctggaaaagtttcttgcctggcttacagaagctgaaacaactgccaatgtcctacaggatgctacccgtaaggaaaggctcctagaagactccaagggagtaaaagagctgatgaaacaatggcaagacctccaaggtgaaattgaagctcacacagatgtttatcacaacctggatgaaaacagccaaaaaatcctgagatccctggaaggttccgatgatgcagtcctgttacaaagacgtttggataacatgaacttcaagtggagtgaacttcggaaaaagtctctcaacattaggtcccatttggaagccagttctgaccagtggaagcgtctgcacctttctctgcaggaacttctggtgtggctacagctgaaagatgatgaattaagccggcaggcacctattggaggcgactttccagcagttcagaagcagaacgatgtacatagggccttcaagagggaattgaaaactaaagaacctgtaatcatgagtactcttgagactgtacgaatatttctgacagagcagcctttggaaggactagagaaactctaccaggagcccagagagctgcctcctgaggagagagcccagaatgtcactcggcttctacgaaagcaggctgaggaggtcaatactgagtgggaaaaattgaacctgcactccgctgactggcagagaaaaatagatgagacccttgaaagactccgggaacttcaagaggccacggatgagctggacctcaagctgcgccaagctgaggtgatcaagggatcctggcagcccgtgggcgatctcctcattgactctctccaagatcacctcgagaaagtcaaggcacttcgaggagaaattgcgcctctgaaagagaacgtgagccacgtcaatgaccttgctcgccagcttaccactttgggcattcagctctcaccgtataacctcagcactctggaagacctgaacaccagatggaagcttctgcaggtggccgtcgaggaccgagtcaggcagctgcatgaagcccacagggactttggtccagcatctcagcactttctttccacgtctgtccagggtccctgggagagagccatctcgccaaacaaagtgccctactatatcaaccacgagactcaaacaacttgctgggaccatcccaaaatgacagagctctaccagtctttagctgacctgaataatgtcagattctcagcttataggactgccatgaaactccgaagactgcagaaggccctttgcttggatctcttgagcctgtcagctgcatgtgatgccttggaccagcacaacctcaagcaaaatgaccagcccatggatatcctgcagattattaattgtttgaccactatttatgaccgcctggagcaagagcacaacaatttggtcaacgtccctctctgcgtggatatgtgtctgaactggctgctgaatgtttatgatacgggacgaacagggaggatccgtgtcctgtcttttaaaactggcatcatttccctgtgtaaagcacatttggaagacaagtacagataccttttcaagcaagtggcaagttcaacaggattttgtgaccagcgcaggctgggcctccttctgcatgattctatccaaattccaagacagttgggtgaagttgcatcctttgggggcagtaacattgagccaagtgtccggagctgcttccaatttgctaataataagccagagatcgaagcggccctcttcctagactggatgagactggaaccccagtccatggtgtggctgcccgtcctgcacagagtggctgctgcagaaactgccaagcatcaggccaaatgtaacatctgcaaagagtgtccaatcattggattcaggtacaggagtctaaagcactttaattatgacatctgccaaagctgctttttttctggtcgagttgcaaaaggccataaaatgcactatcccatggtggaatattgcactccgactacatcaggagaagatgttcgagactttgccaaggtactaaaaaacaaatttcgaaccaaaaggtattttgcgaagcatccccgaatgggctacctgccagtgcagactgtcttagagggggacaacatggaaactcccgttactctgatcaacttctggccagtagattctgcgcctgcctcgtcccctcagctttcacacgatgatactcattcacgcattgaacattatgctagcaggctagcagaaatggaaaacagcaatggatcttatctaaatgatagcatctctcctaatgagagcatagatgatgaacatttgttaatccagcattactgccaaagtttgaaccaggactcccccctgagccagcctcgtagtcctgcccagatcttgatttccttagagagtgaggaaagaggggagctagagagaatcctagcagatcttgaggaagaaaacaggaatctgcaagcagaatatgaccgtctaaagcagcagcacgaacataaaggcctgtccccactgccgtcccctcctgaaatgatgcccacctctccccagagtccccgggatgctgagctcattgctgaggccaagctactgcgtcaacacaaaggccgcctggaagccaggatgcaaatcctggaagaccacaataaacagctggagtcacagttacacaggctaaggcagctgctggagcaaccccaggcagaggccaaagtgaatggcacaacggtgtcctctccttctacctctctacagaggtccgacagcagtcagcctatgctgctccgagtggttggcagtcaaacttcggactccatgggtgaggaagatcttctcagtcctccccaggacacaagcacagggttagaggaggtgatggagcaactcaacaactccttccctagttcaagaggacacaatgtaggaagtcttttccacatggcagatgatttgggcagagcgatggagtccttagtatcagtcatgacagatgaagaaggagcagaataaatgttttacaactcctgattcccgcatggtttttataatattcatacaacaaagaggattagacagtaagagtttacaagaaataaatctatatttttgtgaagggtagtggtattatactgtagatttcagtagtttctaagtctgttattgttttgttaacaatggcaggttttacacgtctatgcaattgtacaaaaaagttataagaaaactacatgtaaaatcttgatagctaaataacttgccatttctttatatggaacgcattttgggttgtttaaaaatttataacagttataaagaaagattgtaaactaaagtgtgctttataaaaaaaagttgtttataaaaacccctaaaaacaaaacaaacacacacacacacacatacacacacacacacaaaactttgaggcagcgcattgttttgcatccttttggcgtgatatccatatgaaattcatggctttttctttttttgcatattaaagataagacttcctctaccaccacaccaaatgactactacacactgctcatttgagaactgtcagctgagtggggcaggcttgagttttcatttcatatatctatatgtctataagtatataaatactatagttatatagataaagagatacgaatttctatagactgactttttccattttttaaatgttcatgtcacatcctaatagaaagaaattacttctagtcagtcatccaggcttacctgcttggtctagaatggatttttcccggagccggaagccaggaggaaactacaccacactaaaacattgtctacagctccagatgtttctcattttaaacaactttccactgacaacgaaagtaaagtaaagtattggatttttttaaagggaacatgtgaatgaatacacaggacttattatatcagagtgagtaatcggttggttggttgattgattgattgattgatacattcagcttcctgctgctagcaatgccacgatttagatttaatgatgcttcagtggaaatcaatcagaaggtattctgaccttgtgaacatcagaaggtattttttaactcccaagcagtagcaggacgatgatagggctggagggctatggattcccagcccatccctgtgaaggagtaggccactctttaagtgaaggattggatgattgttcataatacataaagttctctgtaattacaactaaattattatgccctcttctcacagtcaaaaggaactgggtggtttggtttttgttgcttttttagatttattgtcccatgtgggatgagtttttaaatgccacaagacataatttaaaataaataaactttgggaaaaggtgtaaaacagtagccccatcacatttgtgatactgacaggtatcaacccagaagcccatgaactgtgtttccatcctttgcatttctctgcgagtagttccacacaggtttgtaagtaagtaagaaagaaggcaaattgattcaaatgttacaaaaaaacccttcttggtggattagacaggttaaatatataaacaaacaaacaaaaattgctcaaaaaagaggagaaaagctcaagaggaaaagctaaggactggtaggaaaaagctttactctttcatgccattttatttctttttgatttttaaatcattcattcaatagataccaccgtgtgacctataattttgcaaatctgttacctctgacatcaagtgtaattagcttttggagagtgggctgacatcaagtgtaattagcttttggagagtgggttttgtccattattaataattaattaattaacatcaaacacggcttctcatgctatttctacctcactttggttttggggtgttcctgataattgtgcacacctgagttcacagcttcaccacttgtccattgcgttattttctttttcctttataattctttctttttccttcataattttcaaaagaaaacccaaagctctaaggtaacaaattaccaaattacatgaagatttggtttttgtcttgcatttttttcctttatgtgacgctggaccttttctttacccaaggatttttaaaactcagatttaaaacaaggggttactttacatcctactaagaagtttaagtaagtaagtttcattctaaaatcagaggtaaatagagtgcataaataattttgttttaatctttttgtttttcttttagacacattagctctggagtgagtctgtcataatatttgaacaaaaattgagagctttattgctgcattttaagcataattaatttggacattatttcgtgttgtgttctttataaccaccaagtattaaactgtaaatcataatgtaactgaagcataaacatcacatggcatgttttgtcattgttttcaggtactgagttcttacttgagtatcataatatattgtgttttaacaccaacactgtaacatttacgaattatttttttaaacttcagttttactgcattttcacaacatatcagacttcaccaaatatatgccttactattgtattatagtactgctttactgtgtatctcaataaagcacgcagttatgttacaaaaaagta

SEQ ID NO: 53 - protein, 3657 aa, Homo sapiens
MLWWEEVEDCYEREDVQKKTFTKWVNAQFSKFGKQHIENLFSDLQDGRRLLDLLEGLTGQKLPKEKGSTRVHALNNVNKALRVLQNNNVDLVNIGSTDIVDGNHKLTLGLIWNIILHWQVKNVMKNIMAGLQQTNSEKILLSWVRQSTRNYPQVNVINFTTSWSDGLALNALIHSHRPDLFDWNSVVCQQSATQRLEHAFNIARYQLGIEKLLDPEDVDTTYPDKKSILMYITSLFQVLPQQVSIEAIQEVEMLPRPPKVTKEEHFQLHHQMHYSQQITVSLAQGYERTSSPKPRFKSYAYTQAAYVTTSDPTRSPFPSQHLEAPEDKSFGSSLMESEVNLDRYQTALEEVLSWLLSAEDTLQAQGEISNDVEVVKDQFHTHEGYMMDLTAHQGRVGNILQLGSKLIGTGKLSEDEETEVQEQMNLLNSRWECLRVASMEKQSNLHRVLMDLQNQKLKELNDWLTKTEERTRKMEEEPLGPDLEDLKRQVQQHKVLQEDLEQEQVRVNSLTHMVVVVDESSGDHATAALEEQLKVLGDRWANICRWTEDRWVLLQDILLKWQRLTEEQCLFSAWLSEKEDAVNKIHTTGFKDQNEMLSSLQKLAVLKADLEKKKQSMGKLYSLKQDLLSTLKNKSVTQKTEAWLDNFARCWDNLVQKLEKSTAQISQAVTTTQPSLTQTTVMETVTTVTTREQILVKHAQEELPPPPPQKKRQITVDSEIRKRLDVDITELHSWITRSEAVLQSPEFAIFRKEGNFSDLKEKVNAIEREKAEKFRKLQDASRSAQALVEQMVNEGVNADSIKQASEQLNSRWIEFCQLLSERLNWLEYQNNIIAFYNQLQQLEQMTTTAENWLKIQPTTPSEPTAIKSQLKICKDEVNRLSDLQPQIERLKIQSIALKEKGQGPMFLDADFVAFTNHFKQVFSDVQAREKELQTIFDTLPPMRYQETMSAIRTWVQQSETKLSIPQLSVTDYEIMEQRLGELQALQSSLQEQQSGLYYLSTTVKEMSKKAPSEISRKYQSEFEEIEGRWKKLSSQLVEHCQKLEEQMNKLRKIQNHIQTLKKWMAEVDVFLKEEWPALGDSEILKKQLKQCRLLVSDIQTIQPSLNSVNEGGQKIKNEAEPEFASRLETELKELNTQWDHMCQQVYARKEALKGGLEKTVSLQKDLSEMHEWMTQAEEEYLERDFEYKTPDELQKAVEEMKRAKEEAQQKEAKVKLLTESVNSVIAQAPPVAQEALKKELETLTTNYQWLCTRLNGKCKTLEEVWACWHELLSYLEKANKWLNEVEFKLKTTENIPGGAEEISEVLDSLENLMRHSEDNPNQIRILAQTLTDGGVMDELINEELETFNSRWRELHEEAVRRQKLLEQSIQSAQETEKSLHLIQESLTFIDKQLAAYIADKVDAAQMPQEAQKIQSDLTSHEISLEEMKKHNQGKEAAQRVLSQIDVAQKKLQDVSMKFRLFQKPANFEQRLQESKMILDEVKMHLPALETKSVEQEVVQSQLNHCVNLYKSLSEVKSEVEMVIKTGRQIVQKKQTENPKELDERVTALKLHYNELGAKVTERKQQLEKCLKLSRKMRKEMNVLTEWLAATDMELTKRSAVEGMPSNLDSEVAWGKATQKEIEKQKVHLKSITEVGEALKTVLGKKETLVEDKLSLLNSNWIAVTSRAEEWLNLLLEYQKHMETFDQNVDHITKWIIQADTLLDESEKKKPQQKEDVLKRLKAELNDIRPKVDSTRDQAANLMANRGDHCRKLVEPQISELNHRFAAISHRIKTGKASIPLKELEQFNSDIQKLLEPLEAEIQQGVNLKEEDFNKDMDLRSQRRKKALEISHQWYQYKRQADDLLKCLDDIEKKLASLPEPRDERKIKEIDRELQKKKEELNAVRRQAEGLSEDGAAMAVEPTQIQLSKRWREIESKFAQFRRLNFAQIHTVREETMMVMTEDMPLEISYVPSTYLTEITHVSQALLEVEQLLNAPDLCAKDFEDLFKQEESLKNIKDSLQQSSGRIDIIHSKKTAALQSATPVERVKLQEALSQLDFQWEKVNKMYKDRQGRFDRSVEKWRRFHYDIKIFNQWLTEAEQFLRKTQIPENWEHAKYKWYLKELQDGIGQRQTVVRTLNATGEEIIQQSSKTDASILQEKLGSLNLRWQEVCKQLSDRKKRLEEQKNILSEFQRDLNEFVLWLEEADNIASIPLEPGKEQQLKEKLEQVKLLVEELPLRQGILKQLNETGGPVLVSAPISPEEQDKLENKLKQTNLQWIKVSRALPEKQGEIEAQIKDLGQLEKKLEDLEEQLNHLLLWLSPIRNQLEIYNQPNQEGPFDVKETEIAVQAKQPDVEEILSKGQHLYKEKPATQPVKRKLEDLSSEWKAVNRLLQELRAKQPDLAPGLTTIGASPTQTVTLVTQPVVTKETAISKLEMPSSLMLEVPALADFNRAWTELTDWLSLLDQVIKSQRVMVGDLEDINEMIIKQKATMQDLEQRRPQLEELITAAQNLKNKTSNQEARTIITDRIERIQNQWDEVQEHLQNRRQQLNEMLKDSTQWLEAKEEAEQVLGQARAKLESWKEGPYTVDAIQKKITETKQLAKDLRQWQTNVDVANDLALKLLRDYSADDTRKVHMITENINASWRSIHKRVSEREAALEETHRLLQQFPLDLEKFLAWLTEAETTANVLQDATRKERLLEDSKGVKELMKQWQDLQGEIEAHTDVYHNLDENSQKILRSLEGSDDAVLLQRRLDNMNFKWSELRKKSLNIRSHLEASSDQWKRLHLSLQELLVWLQLKDDELSRQAPIGGDFPAVQKQNDVHRAFKRELKTKEPVIMSTLETVRIFLTEQPLEGLEKLYQEPRELPPEERAQNVTRLLRKQAEEVNTEWEKLNLHSADWQRKIDETLERLRELQEATDELDLKLRQAEVIKGSWQPVGDLLIDSLQDHLEKVKALRGEIAPLKENVSHVNDLARQLTTLGIQLSPYNLSTLEDLNTRWKLLQVAVEDRVRQLHEAHRDFGPASQHFLSTSVQGPWERAISPNKVPYYINHETQTTCWDHPKMTELYQSLADLNNVRFSAYRTAMKLRRLQKALCLDLLSLSAACDALDQHNLKQNDQPMDILQIINCLTTIYDRLEQEHNNLVNVPLCVDMCLNWLLNVYDTGRTGRIRVLSFKTGIISLCKAHLEDKYRYLFKQVASSTGFCDQRRLGLLLHDSIQIPRQLGEVASFGGSNIEPSVRSCFQFANNKPEIEAALFLDWMRLEPQSMVWLPVLHRVAAAETAKHQAKCNICKECPIIGFRYRSLKHFNYDICQSCFFSGRVAKGHKMHYPMVEYCTPTTSGEDVRDFAKVLKNKFRTKRYFAKHPRMGYLPVQTVLEGDNMETPVTLINFWPVDSAPASSPQLSHDDTHSRIEHYASRLAEMENSNGSYLNDSISPNESIDDEHLLIQHYCQSLNQDSPLSQPRSPAQILISLESEERGELERILADLEEENRNLQAEYDRLKQQHEHKGLSPLPSPPEMMPTSPQSPRDAELIAEAKLLRQHKGRLEARMQILEDHNKQLESQLHRLRQLLEQPQAEAKVNGTTVSSPSTSLQRSDSSQPMLLRVVGSQTSDSMGEEDLLSPPQDTSTGLEEVMEQLNNSFPSSRGHNVGSLFHMADDLGRAMESLVSVMTDEEGAE

SEQ ID NO: 54 - DNA, 13625 bp, Homo sapiens
actttccccctacaggactcagatctgggaggcaattaccttcggagaaaaacgaataggaaaaactgaagtgttactttttttaaagctgctgaagtttgttggtttctcattgtttttaagcctactggagcaataaagtttgaagaacttttaccaggttttttttatcgctgccttgatatacacttttcaaaatgctttggtgggaagaagtagaggactgttatgaaagagaagatgttcaaaagaaaacattcacaaaatgggtaaatgcacaattttctaagtttgggaagcagcatattgagaacctcttcagtgacctacaggatgggaggcgcctcctagacctcctcgaaggcctgacagggcaaaaactgccaaaagaaaaaggatccacaagagttcatgccctgaacaatgtcaacaaggcactgcgggttttgcagaacaataatgttgatttagtgaatattggaagtactgacatcgtagatggaaatcataaactgactcttggtttgatttggaatataatcctccactggcaggtcaaaaatgtaatgaaaaatatcatggctggattgcaacaaaccaacagtgaaaagattctcctgagctgggtccgacaatcaactcgtaattatccacaggttaatgtaatcaacttcaccaccagctggtctgatggcctggctttgaatgctctcatccatagtcataggccagacctatttgactggaatagtgtggtttgccagcagtcagccacacaacgactggaacatgcattcaacatcgccagatatcaattaggcatagagaaactactcgatcctgaagatgttgataccacctatccagataagaagtccatcttaatgtacatcacatcactcttccaagttttgcctcaacaagtgagcattgaagccatccaggaagtggaaatgttgccaaggccacctaaagtgactaaagaagaacattttcagttacatcatcaaatgcactattctcaacagatcacggtcagtctagcacagggatatgagagaacttcttcccctaagcctcgattcaagagctatgcctacacacaggctgcttatgtcaccacctctgaccctacacggagcccatttccttcacagcatttggaagctcctgaagacaagtcatttggcagttcattgatggagagtgaagtaaacctggaccgttatcaaacagctttagaagaagtattatcgtggcttctttctgctgaggacacattgcaagcacaaggagagatttctaatgatgtggaagtggtgaaagaccagtttcatactcatgaggggtacatgatggatttgacagcccatcagggccgggttggtaatattctacaattgggaagtaagctgattggaacaggaaaattatcagaagatgaagaaactgaagtacaagagcagatgaatctcctaaattcaagatgggaatgcctcagggtagctagcatggaaaaacaaagcaatttacatagagttttaatggatctccagaatcagaaactgaaagagttgaatgactggctaacaaaaacagaagaaagaacaaggaaaatggaggaagagcctcttggacctgatcttgaagacctaaaacgccaagtacaacaacataaggtgcttcaagaagatctagaacaagaacaagtcagggtcaattctctcactcacatggtggtggtagttgatgaatctagtggagatcacgcaactgctgctttggaagaacaacttaaggtattgggagatcgatgggcaaacatctgtagatggacagaagaccgctgggttcttttacaagacatccttctcaaatggcaacgtcttactgaagaacagtgcctttttagtgcatggctttcagaaaaagaagatgcagtgaacaagattcacacaactggctttaaagatcaaaatgaaatgttatcaagtcttcaaaaactggccgttttaaaagcggatctagaaaagaaaaagcaatccatgggcaaactgtattcactcaaacaagatcttctttcaacactgaagaataagtcagtgacccagaagacggaagcatggctggataactttgcccggtgttgggataatttagtccaaaaacttgaaaagagtacagcacagatttcacaggctgtcaccaccactcagccatcactaacacagacaactgtaatggaaacagtaactacggtgaccacaagggaacagatcctggtaaagcatgctcaagaggaacttccaccaccacctccccaaaagaagaggcagattactgtggattctgaaattaggaaaaggttggatgttgatataactgaacttcacagctggattactcgctcagaagctgtgttgcagagtcctgaatttgcaatctttcggaaggaaggcaacttctcagacttaaaagaaaaagtcaatgccatagagcgagaaaaagctgagaagttcagaaaactgcaagatgccagcagatcagctcaggccctggtggaacagatggtgaatgagggtgttaatgcagatagcatcaaacaagcctcagaacaactgaacagccggtggatcgaattctgccagttgctaagtgagagacttaactggctggagtatcagaacaacatcatcgctttctataatcagctacaacaattggagcagatgacaactactgctgaaaactggttgaaaatccaacccaccaccccatcagagccaacagcaattaaaagtcagttaaaaatttgtaaggatgaagtcaaccggctatcagatcttcaacctcaaattgaacgattaaaaattcaaagcatagccctgaaagagaaaggacaaggacccatgttcctggatgcagactttgtggcctttacaaatcattttaagcaagtcttttctgatgtgcaggccagagagaaagagctacagacaatttttgacactttgccaccaatgcgctatcaggagaccatgagtgccatcaggacatgggtccagcagtcagaaaccaaactctccatacctcaacttagtgtcaccgactatgaaatcatggagcagagactcggggaattgcaggctttacaaagttctctgcaagagcaacaaagtggcctatactatctcagcaccactgtgaaagagatgtcgaagaaagcgccctctgaaattagccggaaatatcaatcagaatttgaagaaattgagggacgctggaagaagctctcctcccagctggttgagcattgtcaaaagctagaggagcaaatgaataaactccgaaaaattcagaatcacatacaaaccctgaagaaatggatggctgaagttgatgtttttctgaaggaggaatggcctgcccttggggattcagaaattctaaaaaagcagctgaaacagtgcagacttttagtcagtgatattcagacaattcagcccagtctaaacagtgtcaatgaaggtgggcagaagataaagaatgaagcagagccagagtttgcttcgagacttgagacagaactcaaagaacttaacactcagtgggatcacatgtgccaacaggtctatgccagaaaggaggccttgaagggaggtttggagaaaactgtaagcctccagaaagatctatcagagatgcacgaatggatgacacaagctgaagaagagtatcttgagagagattttgaatataaaactccagatgaattacagaaagcagttgaagagatgaagagagctaaagaagaggcccaacaaaaagaagcgaaagtgaaactccttactgagtctgtaaatagtgtcatagctcaagctccacctgtagcacaagaggccttaaaaaaggaacttgaaactctaaccaccaactaccagtggctctgcactaggctgaatgggaaatgcaagactttggaagaagtttgggcatgttggcatgagttattgtcatacttggagaaagcaaacaagtggctaaatgaagtagaatttaaacttaaaaccactgaaaacattcctggcggagctgaggaaatctctgaggtgctagattcacttgaaaatttgatgcgacattcagaggataacccaaatcagattcgcatattggcacagaccctaacagatggcggagtcatggatgagctaatcaatgaggaacttgagacatttaattctcgttggagggaactacatgaagaggctgtaaggaggcaaaagttgcttgaacagagcatccagtctgcccaggagactgaaaaatccttacacttaatccaggagtccctcacattcattgacaagcagttggcagcttatattgcagacaaggtggacgcagctcaaatgcctcaggaagcccagaaaatccaatctgatttgacaagtcatgagatcagtttagaagaaatgaagaaacataatcaggggaaggaggctgcccaaagagtcctgtctcagattgatgttgcacagaaaaaattacaagatgtctccatgaagtttcgattattccagaaaccagccaattttgagcagcgtctacaagaaagtaagatgattttagatgaagtgaagatgcacttgcctgcattggaaacaaagagtgtggaacaggaagtagtacagtcacagctaaatcattgtgtgaacttgtataaaagtctgagtgaagtgaagtctgaagtggaaatggtgataaagactggacgtcagattgtacagaaaaagcagacggaaaatcccaaagaacttgatgaaagagtaacagctttgaaattgcattataatgagctgggagcaaaggtaacagaaagaaagcaacagttggagaaatgcttgaaattgtcccgtaagatgcgaaaggaaatgaatgtcttgacagaatggctggcagctacagatatggaattgacaaagagatcagcagttgaaggaatgcctagtaatttggattctgaagttgcctggggaaaggctactcaaaaagagattgagaaacagaaggtgcacctgaagagtatcacagaggtaggagaggccttgaaaacagttttgggcaagaaggagacgttggtggaagataaactcagtcttctgaatagtaactggatagctgtcacctcccgagcagaagagtggttaaatcttttgttggaataccagaaacacatggaaacttttgaccagaatgtggaccacatcacaaagtggatcattcaggctgacacacttttggatgaatcagagaaaaagaaaccccagcaaaaagaagacgtgcttaagcgtttaaaggcagaactgaatgacatacgcccaaaggtggactctacacgtgaccaagcagcaaacttgatggcaaaccgcggtgaccactgcaggaaattagtagagccccaaatctcagagctcaaccatcgatttgcagccatttcacacagaattaagactggaaaggcctccattcctttgaaggaattggagcagtttaactcagatatacaaaaattgcttgaaccactggaggctgaaattcagcagggggtgaatctgaaagaggaagacttcaataaagatatgaatgaagacaatgagggtactgtaaaagaattgttgcaaagaggagacaacttacaacaaagaatcacagatgagagaaagcgagaggaaataaagataaaacagcagctgttacagacaaaacataatgctctcaaggatttgaggtctcaaagaagaaaaaaggctctagaaatttctcatcagtggtatcagtacaagaggcaggctgatgatctcctgaaatgcttggatgacattgaaaaaaaattagccagcctacctgagcccagagatgaaaggaaaataaaggaaattgatcgggaattgcagaagaagaaagaggagctgaatgcagtgcgtaggcaagctgagggcttgtctgaggatggggccgcaatggcagtggagccaactcagatccagctcagcaagcgctggcgggaaattgagagcaaatttgctcagtttcgaagactcaactttgcacaaattcacactgtccgtgaagaaacgatgatggtgatgactgaagacatgcctttggaaatttcttatgtgccttctacttatttgactgaaatcactcatgtctcacaagccctattagaagtggaacaacttctcaatgctcctgacctctgtgctaaggactttgaagatctctttaagcaagaggagtctctgaagaatataaaagatagtctacaacaaagctcaggtcggattgacattattcatagcaagaagacagcagcattgcaaagtgcaacgcctgtggaaagggtgaagctacaggaagctctctcccagcttgatttccaatgggaaaaagttaacaaaatgtacaaggaccgacaagggcgatttgacagatctgttgagaaatggcggcgttttcattatgatataaagatatttaatcagtggctaacagaagctgaacagtttctcagaaagacacaaattcctgagaattgggaacatgctaaatacaaatggtatcttaaggaactccaggatggcattgggcagcggcaaactgttgtcagaacattgaatgcaactggggaagaaataattcagcaatcctcaaaaacagatgccagtattctacaggaaaaattgggaagcctgaatctgcggtggcaggaggtctgcaaacagctgtcagacagaaaaaagaggctagaagaacaaaagaatatcttgtcagaatttcaaagagatttaaatgaatttgttttatggttggaggaagcagataacattgctagtatcccacttgaacctggaaaagagcagcaactaaaagaaaagcttgagcaagtcaagttactggtggaagagttgcccctgcgccagggaattctcaaacaattaaatgaaactggaggacccgtgcttgtaagtgctcccataagcccagaagagcaagataaacttgaaaataagctcaagcagacaaatctccagtggataaaggtttccagagctttacctgagaaacaaggagaaattgaagctcaaataaaagaccttgggcagcttgaaaaaaagcttgaagaccttgaagagcagttaaatcatctgctgctgtggttatctcctattaggaatcagttggaaatttataaccaaccaaaccaagaaggaccatttgacgttaaggaaactgaaatagcagttcaagctaaacaaccggatgtggaagagattttgtctaaagggcagcatttgtacaaggaaaaaccagccactcagccagtgaagaggaagttagaagatctgagctctgagtggaaggcggtaaaccgtttacttcaagagctgagggcaaagcagcctgacctagctcctggactgaccactattggagcctctcctactcagactgttactctggtgacacaacctgtggttactaaggaaactgccatctccaaactagaaatgccatcttccttgatgttggaggtacctgctctggcagatttcaaccgggcttggacagaacttaccgactggctttctctgcttgatcaagttataaaatcacagagggtgatggtgggtgaccttgaggatatcaacgagatgatcatcaagcagaaggcaacaatgcaggatttggaacagaggcgtccccagttggaagaactcattaccgctgcccaaaatttgaaaaacaagaccagcaatcaagaggctagaacaatcattacggatcgaattgaaagaattcagaatcagtgggatgaagtacaagaacaccttcagaaccggaggcaacagttgaatgaaatgttaaaggattcaacacaatggctggaagctaaggaagaagctgagcaggtcttaggacaggccagagccaagcttgagtcatggaaggagggtccctatacagtagatgcaatccaaaagaaaatcacagaaaccaagcagttggccaaagacctccgccagtggcagacaaatgtagatgtggcaaatgacttggccctgaaacttctccgggattattctgcagatgataccagaaaagtccacatgataacagagaatatcaatgcctcttggagaagcattcataaaagggtgagtgagcgagaggctgctttggaagaaactcatagattactgcaacagttccccctggacctggaaaagtttcttgcctggcttacagaagctgaaacaactgccaatgtcctacaggatgctacccgtaaggaaaggctcctagaagactccaagggagtaaaagagctgatgaaacaatggcaagacctccaaggtgaaattgaagctcacacagatgtttatcacaacctggatgaaaacagccaaaaaatcctgagatccctggaaggttccgatgatgcagtcctgttacaaagacgtttggataacatgaacttcaagtggagtgaacttcggaaaaagtctctcaacattaggtcccatttggaagccagttctgaccagtggaagcgtctgcacctttctctgcaggaacttctggtgtggctacagctgaaagatgatgaattaagccggcaggcacctattggaggcgactttccagcagttcagaagcagaacgatgtacatagggccttcaagagggaattgaaaactaaagaacctgtaatcatgagtactcttgagactgtacgaatatttctgacagagcagcctttggaaggactagagaaactctaccaggagcccagagagctgcctcctgaggagagagcccagaatgtcactcggcttctacgaaagcaggctgaggaggtcaatactgagtgggaaaaattgaacctgcactccgctgactggcagagaaaaatagatgagacccttgaaagactccgggaacttcaagaggccacggatgagctggacctcaagctgcgccaagctgaggtgatcaagggatcctggcagcccgtgggcgatctcctcattgactctctccaagatcacctcgagaaagtcaaggcacttcgaggagaaattgcgcctctgaaagagaacgtgagccacgtcaatgaccttgctcgccagcttaccactttgggcattcagctctcaccgtataacctcagcactctggaagacctgaacaccagatggaagcttctgcaggtggccgtcgaggaccgagtcaggcagctgcatgaagcccacagggactttggtccagcatctcagcactttctttccacgtctgtccagggtccctgggagagagccatctcgccaaacaaagtgccctactatatcaaccacgagactcaaacaacttgctgggaccatcccaaaatgacagagctctaccagtctttagctgacctgaataatgtcagattctcagcttataggactgccatgaaactccgaagactgcagaaggccctttgcttggatctcttgagcctgtcagctgcatgtgatgccttggaccagcacaacctcaagcaaaatgaccagcccatggatatcctgcagattattaattgtttgaccactatttatgaccgcctggagcaagagcacaacaatttggtcaacgtccctctctgcgtggatatgtgtctgaactggctgctgaatgtttatgatacgggacgaacagggaggatccgtgtcctgtcttttaaaactggcatcatttccctgtgtaaagcacatttggaagacaagtacagataccttttcaagcaagtggcaagttcaacaggattttgtgaccagcgcaggctgggcctccttctgcatgattctatccaaattccaagacagttgggtgaagttgcatcctttgggggcagtaacattgagccaagtgtccggagctgcttccaatttgctaataataagccagagatcgaagcggccctcttcctagactggatgagactggaaccccagtccatggtgtggctgcccgtcctgcacagagtggctgctgcagaaactgccaagcatcaggccaaatgtaacatctgcaaagagtgtccaatcattggattcaggtacaggagtctaaagcactttaattatgacatctgccaaagctgctttttttctggtcgagttgcaaaaggccataaaatgcactatcccatggtggaatattgcactccgactacatcaggagaagatgttcgagactttgccaaggtactaaaaaacaaatttcgaaccaaaaggtattttgcgaagcatccccgaatgggctacctgccagtgcagactgtcttagagggggacaacatggaaacgaatctgcaagcagaatatgaccgtctaaagcagcagcacgaacataaaggcctgtccccactgccgtcccctcctgaaatgatgcccacctctccccagagtccccgggatgctgagctcattgctgaggccaagctactgcgtcaacacaaaggccgcctggaagccaggatgcaaatcctggaagaccacaataaacagctggagtcacagttacacaggctaaggcagctgctggagcaaccccaggcagaggccaaagtgaatggcacaacggtgtcctctccttctacctctctacagaggtccgacagcagtcagcctatgctgctccgagtggttggcagtcaaacttcggactccatgggtgaggaagatcttctcagtcctccccaggacacaagcacagggttagaggaggtgatggagcaactcaacaactccttccctagttcaagaggaagaaatacccctggaaagccaatgagagaggacacaatgtaggaagtcttttccacatggcagatgatttgggcagagcgatggagtccttagtatcagtcatgacagatgaagaaggagcagaataaatgttttacaactcctgattcccgcatggtttttataatattcatacaacaaagaggattagacagtaagagtttacaagaaataaatctatatttttgtgaagggtagtggtattatactgtagatttcagtagtttctaagtctgttattgttttgttaacaatggcaggttttacacgtctatgcaattgtacaaaaaagttataagaaaactacatgtaaaatcttgatagctaaataacttgccatttctttatatggaacgcattttgggttgtttaaaaatttataacagttataaagaaagattgtaaactaaagtgtgctttataaaaaaaagttgtttataaaaacccctaaaaacaaaacaaacacacacacacacacatacacacacacacacaaaactttgaggcagcgcattgttttgcatccttttggcgtgatatccatatgaaattcatggctttttctttttttgcatattaaagataagacttcctctaccaccacaccaaatgactactacacactgctcatttgagaactgtcagctgagtggggcaggcttgagttttcatttcatatatctatatgtctataagtatataaatactatagttatatagataaagagatacgaatttctatagactgactttttccattttttaaatgttcatgtcacatcctaatagaaagaaattacttctagtcagtcatccaggcttacctgcttggtctagaatggatttttcccggagccggaagccaggaggaaactacaccacactaaaacattgtctacagctccagatgtttctcattttaaacaactttccactgacaacgaaagtaaagtaaagtattggatttttttaaagggaacatgtgaatgaatacacaggacttattatatcagagtgagtaatcggttggttggttgattgattgattgattgatacattcagcttcctgctgctagcaatgccacgatttagatttaatgatgcttcagtggaaatcaatcagaaggtattctgaccttgtgaacatcagaaggtattttttaactcccaagcagtagcaggacgatgatagggctggagggctatggattcccagcccatccctgtgaaggagtaggccactctttaagtgaaggattggatgattgttcataatacataaagttctctgtaattacaactaaattattatgccctcttctcacagtcaaaaggaactgggtggtttggtttttgttgcttttttagatttattgtcccatgtgggatgagtttttaaatgccacaagacataatttaaaataaataaactttgggaaaaggtgtaaaacagtagccccatcacatttgtgatactgacaggtatcaacccagaagcccatgaactgtgtttccatcctttgcatttctctgcgagtagttccacacaggtttgtaagtaagtaagaaagaaggcaaattgattcaaatgttacaaaaaaacccttcttggtggattagacaggttaaatatataaacaaacaaacaaaaattgctcaaaaaagaggagaaaagctcaagaggaaaagctaaggactggtaggaaaaagctttactctttcatgccattttatttctttttgatttttaaatcattcattcaatagataccaccgtgtgacctataattttgcaaatctgttacctctgacatcaagtgtaattagcttttggagagtgggctgacatcaagtgtaattagcttttggagagtgggttttgtccattattaataattaattaattaacatcaaacacggcttctcatgctatttctacctcactttggttttggggtgttcctgataattgtgcacacctgagttcacagcttcaccacttgtccattgcgttattttctttttcctttataattctttctttttccttcataattttcaaaagaaaacccaaagctctaaggtaacaaattaccaaattacatgaagatttggtttttgtcttgcatttttttcctttatgtgacgctggaccttttctttacccaaggatttttaaaactcagatttaaaacaaggggttactttacatcctactaagaagtttaagtaagtaagtttcattctaaaatcagaggtaaatagagtgcataaataattttgttttaatctttttgtttttcttttagacacattagctctggagtgagtctgtcataatatttgaacaaaaattgagagctttattgctgcattttaagcataattaatttggacattatttcgtgttgtgttctttataaccaccaagtattaaactgtaaatcataatgtaactgaagcataaacatcacatggcatgttttgtcattgttttcaggtactgagttcttacttgagtatcataatatattgtgttttaacaccaacactgtaacatttacgaattatttttttaaacttcagttttactgcattttcacaacatatcagacttcaccaaatatatgccttactattgtattatagtactgctttactgtgtatctcaataaagcacgcagttatgttacaaaaaagta

SEQ ID NO: 55 - protein, 3575 aa, Homo sapiens
MLWWEEVEDCYEREDVQKKTFTKWVNAQFSKFGKQHIENLFSDLQDGRRLLDLLEGLTGQKLPKEKGSTRVHALNNVNKALRVLQNNNVDLVNIGSTDIVDGNHKLTLGLIWNIILHWQVKNVMKNIMAGLQQTNSEKILLSWVRQSTRNYPQVNVINFTTSWSDGLALNALIHSHRPDLFDWNSVVCQQSATQRLEHAFNIARYQLGIEKLLDPEDVDTTYPDKKSILMYITSLFQVLPQQVSIEAIQEVEMLPRPPKVTKEEHFQLHHQMHYSQQITVSLAQGYERTSSPKPRFKSYAYTQAAYVTTSDPTRSPFPSQHLEAPEDKSFGSSLMESEVNLDRYQTALEEVLSWLLSAEDTLQAQGEISNDVEVVKDQFHTHEGYMMDLTAHQGRVGNILQLGSKLIGTGKLSEDEETEVQEQMNLLNSRWECLRVASMEKQSNLHRVLMDLQNQKLKELNDWLTKTEERTRKMEEEPLGPDLEDLKRQVQQHKVLQEDLEQEQVRVNSLTHMVVVVDESSGDHATAALEEQLKVLGDRWANICRWTEDRWVLLQDILLKWQRLTEEQCLFSAWLSEKEDAVNKIHTTGFKDQNEMLSSLQKLAVLKADLEKKKQSMGKLYSLKQDLLSTLKNKSVTQKTEAWLDNFARCWDNLVQKLEKSTAQISQAVTTTQPSLTQTTVMETVTTVTTREQILVKHAQEELPPPPPQKKRQITVDSEIRKRLDVDITELHSWITRSEAVLQSPEFAIFRKEGNFSDLKEKVNAIEREKAEKFRKLQDASRSAQALVEQMVNEGVNADSIKQASEQLNSRWIEFCQLLSERLNWLEYQNNIIAFYNQLQQLEQMTTTAENWLKIQPTTPSEPTAIKSQLKICKDEVNRLSDLQPQIERLKIQSIALKEKGQGPMFLDADFVAFTNHFKQVFSDVQAREKELQTIFDTLPPMRYQETMSAIRTWVQQSETKLSIPQLSVTDYEIMEQRLGELQALQSSLQEQQSGLYYLSTTVKEMSKKAPSEISRKYQSEFEEIEGRWKKLSSQLVEHCQKLEEQMNKLRKIQNHIQTLKKWMAEVDVFLKEEWPALGDSEILKKQLKQCRLLVSDIQTIQPSLNSVNEGGQKIKNEAEPEFASRLETELKELNTQWDHMCQQVYARKEALKGGLEKTVSLQKDLSEMHEWMTQAEEEYLERDFEYKTPDELQKAVEEMKRAKEEAQQKEAKVKLLTESVNSVIAQAPPVAQEALKKELETLTTNYQWLCTRLNGKCKTLEEVWACWHELLSYLEKANKWLNEVEFKLKTTENIPGGAEEISEVLDSLENLMRHSEDNPNQIRILAQTLTDGGVMDELINEELETFNSRWRELHEEAVRRQKLLEQSIQSAQETEKSLHLIQESLTFIDKQLAAYIADKVDAAQMPQEAQKIQSDLTSHEISLEEMKKHNQGKEAAQRVLSQIDVAQKKLQDVSMKFRLFQKPANFEQRLQESKMILDEVKMHLPALETKSVEQEVVQSQLNHCVNLYKSLSEVKSEVEMVIKTGRQIVQKKQTENPKELDERVTALKLHYNELGAKVTERKQQLEKCLKLSRKMRKEMNVLTEWLAATDMELTKRSAVEGMPSNLDSEVAWGKATQKEIEKQKVHLKSITEVGEALKTVLGKKETLVEDKLSLLNSNWIAVTSRAEEWLNLLLEYQKHMETFDQNVDHITKWIIQADTLLDESEKKKPQQKEDVLKRLKAELNDIRPKVDSTRDQAANLMANRGDHCRKLVEPQISELNHRFAAISHRIKTGKASIPLKELEQFNSDIQKLLEPLEAEIQQGVNLKEEDFNKDMNEDNEGTVKELLQRGDNLQQRITDERKREEIKIKQQLLQTKHNALKDLRSQRRKKALEISHQWYQYKRQADDLLKCLDDIEKKLASLPEPRDERKIKEIDRELQKKKEELNAVRRQAEGLSEDGAAMAVEPTQIQLSKRWREIESKFAQFRRLNFAQIHTVREETMMVMTEDMPLEISYVPSTYLTEITHVSQALLEVEQLLNAPDLCAKDFEDLFKQEESLKNIKDSLQQSSGRIDIIHSKKTAALQSATPVERVKLQEALSQLDFQWEKVNKMYKDRQGRFDRSVEKWRRFHYDIKIFNQWLTEAEQFLRKTQIPENWEHAKYKWYLKELQDGIGQRQTVVRTLNATGEEIIQQSSKTDASILQEKLGSLNLRWQEVCKQLSDRKKRLEEQKNILSEFQRDLNEFVLWLEEADNIASIPLEPGKEQQLKEKLEQVKLLVEELPLRQGILKQLNETGGPVLVSAPISPEEQDKLENKLKQTNLQWIKVSRALPEKQGEIEAQIKDLGQLEKKLEDLEEQLNHLLLWLSPIRNQLEIYNQPNQEGPFDVKETEIAVQAKQPDVEEILSKGQHLYKEKPATQPVKRKLEDLSSEWKAVNRLLQELRAKQPDLAPGLTTIGASPTQTVTLVTQPVVTKETAISKLEMPSSLMLEVPALADFNRAWTELTDWLSLLDQVIKSQRVMVGDLEDINEMIIKQKATMQDLEQRRPQLEELITAAQNLKNKTSNQEARTIITDRIERIQNQWDEVQEHLQNRRQQLNEMLKDSTQWLEAKEEAEQVLGQARAKLESWKEGPYTVDAIQKKITETKQLAKDLRQWQTNVDVANDLALKLLRDYSADDTRKVHMITENINASWRSIHKRVSEREAALEETHRLLQQFPLDLEKFLAWLTEAETTANVLQDATRKERLLEDSKGVKELMKQWQDLQGEIEAHTDVYHNLDENSQKILRSLEGSDDAVLLQRRLDNMNFKWSELRKKSLNIRSHLEASSDQWKRLHLSLQELLVWLQLKDDELSRQAPIGGDFPAVQKQNDVHRAFKRELKTKEPVIMSTLETVRIFLTEQPLEGLEKLYQEPRELPPEERAQNVTRLLRKQAEEVNTEWEKLNLHSADWQRKIDETLERLRELQEATDELDLKLRQAEVIKGSWQPVGDLLIDSLQDHLEKVKALRGEIAPLKENVSHVNDLARQLTTLGIQLSPYNLSTLEDLNTRWKLLQVAVEDRVRQLHEAHRDFGPASQHFLSTSVQGPWERAISPNKVPYYINHETQTTCWDHPKMTELYQSLADLNNVRFSAYRTAMKLRRLQKALCLDLLSLSAACDALDQHNLKQNDQPMDILQIINCLTTIYDRLEQEHNNLVNVPLCVDMCLNWLLNVYDTGRTGRIRVLSFKTGIISLCKAHLEDKYRYLFKQVASSTGFCDQRRLGLLLHDSIQIPRQLGEVASFGGSNIEPSVRSCFQFANNKPEIEAALFLDWMRLEPQSMVWLPVLHRVAAAETAKHQAKCNICKECPIIGFRYRSLKHFNYDICQSCFFSGRVAKGHKMHYPMVEYCTPTTSGEDVRDFAKVLKNKFRTKRYFAKHPRMGYLPVQTVLEGDNMETNLQAEYDRLKQQHEHKGLSPLPSPPEMMPTSPQSPRDAELIAEAKLLRQHKGRLEARMQILEDHNKQLESQLHRLRQLLEQPQAEAKVNGTTVSSPSTSLQRSDSSQPMLLRVVGSQTSDSMGEEDLLSPPQDTSTGLEEVMEQLNNSFPSSRGRNTPGKPMREDTM

SEQ ID NO: 56 - DNA, 13916 bp, Homo sapiens
actttccccctacaggactcagatctgggaggcaattaccttcggagaaaaacgaataggaaaaactgaagtgttactttttttaaagctgctgaagtttgttggtttctcattgtttttaagcctactggagcaataaagtttgaagaacttttaccaggttttttttatcgctgccttgatatacacttttcaaaatgctttggtgggaagaagtagaggactgttatgaaagagaagatgttcaaaagaaaacattcacaaaatgggtaaatgcacaattttctaagtttgggaagcagcatattgagaacctcttcagtgacctacaggatgggaggcgcctcctagacctcctcgaaggcctgacagggcaaaaactgccaaaagaaaaaggatccacaagagttcatgccctgaacaatgtcaacaaggcactgcgggttttgcagaacaataatgttgatttagtgaatattggaagtactgacatcgtagatggaaatcataaactgactcttggtttgatttggaatataatcctccactggcaggtcaaaaatgtaatgaaaaatatcatggctggattgcaacaaaccaacagtgaaaagattctcctgagctgggtccgacaatcaactcgtaattatccacaggttaatgtaatcaacttcaccaccagctggtctgatggcctggctttgaatgctctcatccatagtcataggccagacctatttgactggaatagtgtggtttgccagcagtcagccacacaacgactggaacatgcattcaacatcgccagatatcaattaggcatagagaaactactcgatcctgaagatgttgataccacctatccagataagaagtccatcttaatgtacatcacatcactcttccaagttttgcctcaacaagtgagcattgaagccatccaggaagtggaaatgttgccaaggccacctaaagtgactaaagaagaacattttcagttacatcatcaaatgcactattctcaacagatcacggtcagtctagcacagggatatgagagaacttcttcccctaagcctcgattcaagagctatgcctacacacaggctgcttatgtcaccacctctgaccctacacggagcccatttccttcacagcatttggaagctcctgaagacaagtcatttggcagttcattgatggagagtgaagtaaacctggaccgttatcaaacagctttagaagaagtattatcgtggcttctttctgctgaggacacattgcaagcacaaggagagatttctaatgatgtggaagtggtgaaagaccagtttcatactcatgaggggtacatgatggatttgacagcccatcagggccgggttggtaatattctacaattgggaagtaagctgattggaacaggaaaattatcagaagatgaagaaactgaagtacaagagcagatgaatctcctaaattcaagatgggaatgcctcagggtagctagcatggaaaaacaaagcaatttacatagagttttaatggatctccagaatcagaaactgaaagagttgaatgactggctaacaaaaacagaagaaagaacaaggaaaatggaggaagagcctcttggacctgatcttgaagacctaaaacgccaagtacaacaacataaggtgcttcaagaagatctagaacaagaacaagtcagggtcaattctctcactcacatggtggtggtagttgatgaatctagtggagatcacgcaactgctgctttggaagaacaacttaaggtattgggagatcgatgggcaaacatctgtagatggacagaagaccgctgggttcttttacaagacatccttctcaaatggcaacgtcttactgaagaacagtgcctttttagtgcatggctttcagaaaaagaagatgcagtgaacaagattcacacaactggctttaaagatcaaaatgaaatgttatcaagtcttcaaaaactggccgttttaaaagcggatctagaaaagaaaaagcaatccatgggcaaactgtattcactcaaacaagatcttctttcaacactgaagaataagtcagtgacccagaagacggaagcatggctggataactttgcccggtgttgggataatttagtccaaaaacttgaaaagagtacagcacagatttcacaggctgtcaccaccactcagccatcactaacacagacaactgtaatggaaacagtaactacggtgaccacaagggaacagatcctggtaaagcatgctcaagaggaacttccaccaccacctccccaaaagaagaggcagattactgtggattctgaaattaggaaaaggttggatgttgatataactgaacttcacagctggattactcgctcagaagctgtgttgcagagtcctgaatttgcaatctttcggaaggaaggcaacttctcagacttaaaagaaaaagtcaatgccatagagcgagaaaaagctgagaagttcagaaaactgcaagatgccagcagatcagctcaggccctggtggaacagatggtgaatgagggtgttaatgcagatagcatcaaacaagcctcagaacaactgaacagccggtggatcgaattctgccagttgctaagtgagagacttaactggctggagtatcagaacaacatcatcgctttctataatcagctacaacaattggagcagatgacaactactgctgaaaactggttgaaaatccaacccaccaccccatcagagccaacagcaattaaaagtcagttaaaaatttgtaaggatgaagtcaaccggctatcagatcttcaacctcaaattgaacgattaaaaattcaaagcatagccctgaaagagaaaggacaaggacccatgttcctggatgcagactttgtggcctttacaaatcattttaagcaagtcttttctgatgtgcaggccagagagaaagagctacagacaatttttgacactttgccaccaatgcgctatcaggagaccatgagtgccatcaggacatgggtccagcagtcagaaaccaaactctccatacctcaacttagtgtcaccgactatgaaatcatggagcagagactcggggaattgcaggctttacaaagttctctgcaagagcaacaaagtggcctatactatctcagcaccactgtgaaagagatgtcgaagaaagcgccctctgaaattagccggaaatatcaatcagaatttgaagaaattgagggacgctggaagaagctctcctcccagctggttgagcattgtcaaaagctagaggagcaaatgaataaactccgaaaaattcagaatcacatacaaaccctgaagaaatggatggctgaagttgatgtttttctgaaggaggaatggcctgcccttggggattcagaaattctaaaaaagcagctgaaacagtgcagacttttagtcagtgatattcagacaattcagcccagtctaaacagtgtcaatgaaggtgggcagaagataaagaatgaagcagagccagagtttgcttcgagacttgagacagaactcaaagaacttaacactcagtgggatcacatgtgccaacaggtctatgccagaaaggaggccttgaagggaggtttggagaaaactgtaagcctccagaaagatctatcagagatgcacgaatggatgacacaagctgaagaagagtatcttgagagagattttgaatataaaactccagatgaattacagaaagcagttgaagagatgaagagagctaaagaagaggcccaacaaaaagaagcgaaagtgaaactccttactgagtctgtaaatagtgtcatagctcaagctccacctgtagcacaagaggccttaaaaaaggaacttgaaactctaaccaccaactaccagtggctctgcactaggctgaatgggaaatgcaagactttggaagaagtttgggcatgttggcatgagttattgtcatacttggagaaagcaaacaagtggctaaatgaagtagaatttaaacttaaaaccactgaaaacattcctggcggagctgaggaaatctctgaggtgctagattcacttgaaaatttgatgcgacattcagaggataacccaaatcagattcgcatattggcacagaccctaacagatggcggagtcatggatgagctaatcaatgaggaacttgagacatttaattctcgttggagggaactacatgaagaggctgtaaggaggcaaaagttgcttgaacagagcatccagtctgcccaggagactgaaaaatccttacacttaatccaggagtccctcacattcattgacaagcagttggcagcttatattgcagacaaggtggacgcagctcaaatgcctcaggaagcccagaaaatccaatctgatttgacaagtcatgagatcagtttagaagaaatgaagaaacataatcaggggaaggaggctgcccaaagagtcctgtctcagattgatgttgcacagaaaaaattacaagatgtctccatgaagtttcgattattccagaaaccagccaattttgagcagcgtctacaagaaagtaagatgattttagatgaagtgaagatgcacttgcctgcattggaaacaaagagtgtggaacaggaagtagtacagtcacagctaaatcattgtgtgaacttgtataaaagtctgagtgaagtgaagtctgaagtggaaatggtgataaagactggacgtcagattgtacagaaaaagcagacggaaaatcccaaagaacttgatgaaagagtaacagctttgaaattgcattataatgagctgggagcaaaggtaacagaaagaaagcaacagttggagaaatgcttgaaattgtcccgtaagatgcgaaaggaaatgaatgtcttgacagaatggctggcagctacagatatggaattgacaaagagatcagcagttgaaggaatgcctagtaatttggattctgaagttgcctggggaaaggctactcaaaaagagattgagaaacagaaggtgcacctgaagagtatcacagaggtaggagaggccttgaaaacagttttgggcaagaaggagacgttggtggaagataaactcagtcttctgaatagtaactggatagctgtcacctcccgagcagaagagtggttaaatcttttgttggaataccagaaacacatggaaacttttgaccagaatgtggaccacatcacaaagtggatcattcaggctgacacacttttggatgaatcagagaaaaagaaaccccagcaaaaagaagacgtgcttaagcgtttaaaggcagaactgaatgacatacgcccaaaggtggactctacacgtgaccaagcagcaaacttgatggcaaaccgcggtgaccactgcaggaaattagtagagccccaaatctcagagctcaaccatcgatttgcagccatttcacacagaattaagactggaaaggcctccattcctttgaaggaattggagcagtttaactcagatatacaaaaattgcttgaaccactggaggctgaaattcagcagggggtgaatctgaaagaggaagacttcaataaagatatgaatgaagacaatgagggtactgtaaaagaattgttgcaaagaggagacaacttacaacaaagaatcacagatgagagaaagcgagaggaaataaagataaaacagcagctgttacagacaaaacataatgctctcaaggatttgaggtctcaaagaagaaaaaaggctctagaaatttctcatcagtggtatcagtacaagaggcaggctgatgatctcctgaaatgcttggatgacattgaaaaaaaattagccagcctacctgagcccagagatgaaaggaaaataaaggaaattgatcgggaattgcagaagaagaaagaggagctgaatgcagtgcgtaggcaagctgagggcttgtctgaggatggggccgcaatggcagtggagccaactcagatccagctcagcaagcgctggcgggaaattgagagcaaatttgctcagtttcgaagactcaactttgcacaaattcacactgtccgtgaagaaacgatgatggtgatgactgaagacatgcctttggaaatttcttatgtgccttctacttatttgactgaaatcactcatgtctcacaagccctattagaagtggaacaacttctcaatgctcctgacctctgtgctaaggactttgaagatctctttaagcaagaggagtctctgaagaatataaaagatagtctacaacaaagctcaggtcggattgacattattcatagcaagaagacagcagcattgcaaagtgcaacgcctgtggaaagggtgaagctacaggaagctctctcccagcttgatttccaatgggaaaaagttaacaaaatgtacaaggaccgacaagggcgatttgacagatctgttgagaaatggcggcgttttcattatgatataaagatatttaatcagtggctaacagaagctgaacagtttctcagaaagacacaaattcctgagaattgggaacatgctaaatacaaatggtatcttaaggaactccaggatggcattgggcagcggcaaactgttgtcagaacattgaatgcaactggggaagaaataattcagcaatcctcaaaaacagatgccagtattctacaggaaaaattgggaagcctgaatctgcggtggcaggaggtctgcaaacagctgtcagacagaaaaaagaggctagaagaacaaaagaatatcttgtcagaatttcaaagagatttaaatgaatttgttttatggttggaggaagcagataacattgctagtatcccacttgaacctggaaaagagcagcaactaaaagaaaagcttgagcaagtcaagttactggtggaagagttgcccctgcgccagggaattctcaaacaattaaatgaaactggaggacccgtgcttgtaagtgctcccataagcccagaagagcaagataaacttgaaaataagctcaagcagacaaatctccagtggataaaggtttccagagctttacctgagaaacaaggagaaattgaagctcaaataaaagaccttgggcagcttgaaaaaaagcttgaagaccttgaagagcagttaaatcatctgctgctgtggttatctcctattaggaatcagttggaaatttataaccaaccaaaccaagaaggaccatttgacgttaaggaaactgaaatagcagttcaagctaaacaaccggatgtggaagagattttgtctaaagggcagcatttgtacaaggaaaaaccagccactcagccagtgaagaggaagttagaagatctgagctctgagtggaaggcggtaaaccgtttacttcaagagctgagggcaaagcagcctgacctagctcctggactgaccactattggagcctctcctactcagactgttactctggtgacacaacctgtggttactaaggaaactgccatctccaaactagaaatgccatcttccttgatgttggaggtacctgctctggcagatttcaaccgggcttggacagaacttaccgactggctttctctgcttgatcaagttataaaatcacagagggtgatggtgggtgaccttgaggatatcaacgagatgatcatcaagcagaaggcaacaatgcaggatttggaacagaggcgtccccagttggaagaactcattaccgctgcccaaaatttgaaaaacaagaccagcaatcaagaggctagaacaatcattacggatcgaattgaaagaattcagaatcagtgggatgaagtacaagaacaccttcagaaccggaggcaacagttgaatgaaatgttaaaggattcaacacaatggctggaagctaaggaagaagctgagcaggtcttaggacaggccagagccaagcttgagtcatggaaggagggtccctatacagtagatgcaatccaaaagaaaatcacagaaaccaagcagttggccaaagacctccgccagtggcagacaaatgtagatgtggcaaatgacttggccctgaaacttctccgggattattctgcagatgataccagaaaagtccacatgataacagagaatatcaatgcctcttggagaagcattcataaaagggtgagtgagcgagaggctgctttggaagaaactcatagattactgcaacagttccccctggacctggaaaagtttcttgcctggcttacagaagctgaaacaactgccaatgtcctacaggatgctacccgtaaggaaaggctcctagaagactccaagggagtaaaagagctgatgaaacaatggcaagacctccaaggtgaaattgaagctcacacagatgtttatcacaacctggatgaaaacagccaaaaaatcctgagatccctggaaggttccgatgatgcagtcctgttacaaagacgtttggataacatgaacttcaagtggagtgaacttcggaaaaagtctctcaacattaggtcccatttggaagccagttctgaccagtggaagcgtctgcacctttctctgcaggaacttctggtgtggctacagctgaaagatgatgaattaagccggcaggcacctattggaggcgactttccagcagttcagaagcagaacgatgtacatagggccttcaagagggaattgaaaactaaagaacctgtaatcatgagtactcttgagactgtacgaatatttctgacagagcagcctttggaaggactagagaaactctaccaggagcccagagagctgcctcctgaggagagagcccagaatgtcactcggcttctacgaaagcaggctgaggaggtcaatactgagtgggaaaaattgaacctgcactccgctgactggcagagaaaaatagatgagacccttgaaagactccgggaacttcaagaggccacggatgagctggacctcaagctgcgccaagctgaggtgatcaagggatcctggcagcccgtgggcgatctcctcattgactctctccaagatcacctcgagaaagtcaaggcacttcgaggagaaattgcgcctctgaaagagaacgtgagccacgtcaatgaccttgctcgccagcttaccactttgggcattcagctctcaccgtataacctcagcactctggaagacctgaacaccagatggaagcttctgcaggtggccgtcgaggaccgagtcaggcagctgcatgaagcccacagggactttggtccagcatctcagcactttctttccacgtctgtccagggtccctgggagagagccatctcgccaaacaaagtgccctactatatcaaccacgagactcaaacaacttgctgggaccatcccaaaatgacagagctctaccagtctttagctgacctgaataatgtcagattctcagcttataggactgccatgaaactccgaagactgcagaaggccctttgcttggatctcttgagcctgtcagctgcatgtgatgccttggaccagcacaacctcaagcaaaatgaccagcccatggatatcctgcagattattaattgtttgaccactatttatgaccgcctggagcaagagcacaacaatttggtcaacgtccctctctgcgtggatatgtgtctgaactggctgctgaatgtttatgatacgggacgaacagggaggatccgtgtcctgtcttttaaaactggcatcatttccctgtgtaaagcacatttggaagacaagtacagataccttttcaagcaagtggcaagttcaacaggattttgtgaccagcgcaggctgggcctccttctgcatgattctatccaaattccaagacagttgggtgaagttgcatcctttgggggcagtaacattgagccaagtgtccggagctgcttccaatttgctaataataagccagagatcgaagcggccctcttcctagactggatgagactggaaccccagtccatggtgtggctgcccgtcctgcacagagtggctgctgcagaaactgccaagcatcaggccaaatgtaacatctgcaaagagtgtccaatcattggattcaggtacaggagtctaaagcactttaattatgacatctgccaaagctgctttttttctggtcgagttgcaaaaggccataaaatgcactatcccatggtggaatattgcactccgactacatcaggagaagatgttcgagactttgccaaggtactaaaaaacaaatttcgaaccaaaaggtattttgcgaagcatccccgaatgggctacctgccagtgcagactgtcttagagggggacaacatggaaacgcctgcctcgtcccctcagctttcacacgatgatactcattcacgcattgaacattatgctagcaggctagcagaaatggaaaacagcaatggatcttatctaaatgatagcatctctcctaatgagagcatagatgatgaacatttgttaatccagcattactgccaaagtttgaaccaggactcccccctgagccagcctcgtagtcctgcccagatcttgatttccttagagagtgaggaaagaggggagctagagagaatcctagcagatcttgaggaagaaaacaggaatctgcaagcagaatatgaccgtctaaagcagcagcacgaacataaaggcctgtccccactgccgtcccctcctgaaatgatgcccacctctccccagagtccccgggatgctgagctcattgctgaggccaagctactgcgtcaacacaaaggccgcctggaagccaggatgcaaatcctggaagaccacaataaacagctggagtcacagttacacaggctaaggcagctgctggagcaaccccaggcagaggccaaagtgaatggcacaacggtgtcctctccttctacctctctacagaggtccgacagcagtcagcctatgctgctccgagtggttggcagtcaaacttcggactccatgggtgaggaagatcttctcagtcctccccaggacacaagcacagggttagaggaggtgatggagcaactcaacaactccttccctagttcaagaggaagaaatacccctggaaagccaatgagagaggacacaatgtaggaagtcttttccacatggcagatgatttgggcagagcgatggagtccttagtatcagtcatgacagatgaagaaggagcagaataaatgttttacaactcctgattcccgcatggtttttataatattcatacaacaaagaggattagacagtaagagtttacaagaaataaatctatatttttgtgaagggtagtggtattatactgtagatttcagtagtttctaagtctgttattgttttgttaacaatggcaggttttacacgtctatgcaattgtacaaaaaagttataagaaaactacatgtaaaatcttgatagctaaataacttgccatttctttatatggaacgcattttgggttgtttaaaaatttataacagttataaagaaagattgtaaactaaagtgtgctttataaaaaaaagttgtttataaaaacccctaaaaacaaaacaaacacacacacacacacatacacacacacacacaaaactttgaggcagcgcattgttttgcatccttttggcgtgatatccatatgaaattcatggctttttctttttttgcatattaaagataagacttcctctaccaccacaccaaatgactactacacactgctcatttgagaactgtcagctgagtggggcaggcttgagttttcatttcatatatctatatgtctataagtatataaatactatagttatatagataaagagatacgaatttctatagactgactttttccattttttaaatgttcatgtcacatcctaatagaaagaaattacttctagtcagtcatccaggcttacctgcttggtctagaatggatttttcccggagccggaagccaggaggaaactacaccacactaaaacattgtctacagctccagatgtttctcattttaaacaactttccactgacaacgaaagtaaagtaaagtattggatttttttaaagggaacatgtgaatgaatacacaggacttattatatcagagtgagtaatcggttggttggttgattgattgattgattgatacattcagcttcctgctgctagcaatgccacgatttagatttaatgatgcttcagtggaaatcaatcagaaggtattctgaccttgtgaacatcagaaggtattttttaactcccaagcagtagcaggacgatgatagggctggagggctatggattcccagcccatccctgtgaaggagtaggccactctttaagtgaaggattggatgattgttcataatacataaagttctctgtaattacaactaaattattatgccctcttctcacagtcaaaaggaactgggtggtttggtttttgttgcttttttagatttattgtcccatgtgggatgagtttttaaatgccacaagacataatttaaaataaataaactttgggaaaaggtgtaaaacagtagccccatcacatttgtgatactgacaggtatcaacccagaagcccatgaactgtgtttccatcctttgcatttctctgcgagtagttccacacaggtttgtaagtaagtaagaaagaaggcaaattgattcaaatgttacaaaaaaacccttcttggtggattagacaggttaaatatataaacaaacaaacaaaaattgctcaaaaaagaggagaaaagctcaagaggaaaagctaaggactggtaggaaaaagctttactctttcatgccattttatttctttttgatttttaaatcattcattcaatagataccaccgtgtgacctataattttgcaaatctgttacctctgacatcaagtgtaattagcttttggagagtgggctgacatcaagtgtaattagcttttggagagtgggttttgtccattattaataattaattaattaacatcaaacacggcttctcatgctatttctacctcactttggttttggggtgttcctgataattgtgcacacctgagttcacagcttcaccacttgtccattgcgttattttctttttcctttataattctttctttttccttcataattttcaaaagaaaacccaaagctctaaggtaacaaattaccaaattacatgaagatttggtttttgtcttgcatttttttcctttatgtgacgctggaccttttctttacccaaggatttttaaaactcagatttaaaacaaggggttactttacatcctactaagaagtttaagtaagtaagtttcattctaaaatcagaggtaaatagagtgcataaataattttgttttaatctttttgtttttcttttagacacattagctctggagtgagtctgtcataatatttgaacaaaaattgagagctttattgctgcattttaagcataattaatttggacattatttcgtgttgtgttctttataaccaccaagtattaaactgtaaatcataatgtaactgaagcataaacatcacatggcatgttttgtcattgttttcaggtactgagttcttacttgagtatcataatatattgtgttttaacaccaacactgtaacatttacgaattatttttttaaacttcagttttactgcattttcacaacatatcagacttcaccaaatatatgccttactattgtattatagtactgctttactgtgtatctcaataaagcacgcagttatgttacaaaaaagta

SEQ ID NO: 57 - protein, 3672 aa, Homo sapiens
MLWWEEVEDCYEREDVQKKTFTKWVNAQFSKFGKQHIENLFSDLQDGRRLLDLLEGLTGQKLPKEKGSTRVHALNNVNKALRVLQNNNVDLVNIGSTDIVDGNHKLTLGLIWNIILHWQVKNVMKNIMAGLQQTNSEKILLSWVRQSTRNYPQVNVINFTTSWSDGLALNALIHSHRPDLFDWNSVVCQQSATQRLEHAFNIARYQLGIEKLLDPEDVDTTYPDKKSILMYITSLFQVLPQQVSIEAIQEVEMLPRPPKVTKEEHFQLHHQMHYSQQITVSLAQGYERTSSPKPRFKSYAYTQAAYVTTSDPTRSPFPSQHLEAPEDKSFGSSLMESEVNLDRYQTALEEVLSWLLSAEDTLQAQGEISNDVEVVKDQFHTHEGYMMDLTAHQGRVGNILQLGSKLIGTGKLSEDEETEVQEQMNLLNSRWECLRVASMEKQSNLHRVLMDLQNQKLKELNDWLTKTEERTRKMEEEPLGPDLEDLKRQVQQHKVLQEDLEQEQVRVNSLTHMVVVVDESSGDHATAALEEQLKVLGDRWANICRWTEDRWVLLQDILLKWQRLTEEQCLFSAWLSEKEDAVNKIHTTGFKDQNEMLSSLQKLAVLKADLEKKKQSMGKLYSLKQDLLSTLKNKSVTQKTEAWLDNFARCWDNLVQKLEKSTAQISQAVTTTQPSLTQTTVMETVTTVTTREQILVKHAQEELPPPPPQKKRQITVDSEIRKRLDVDITELHSWITRSEAVLQSPEFAIFRKEGNFSDLKEKVNAIEREKAEKFRKLQDASRSAQALVEQMVNEGVNADSIKQASEQLNSRWIEFCQLLSERLNWLEYQNNIIAFYNQLQQLEQMTTTAENWLKIQPTTPSEPTAIKSQLKICKDEVNRLSDLQPQIERLKIQSIALKEKGQGPMFLDADFVAFTNHFKQVFSDVQAREKELQTIFDTLPPMRYQETMSAIRTWVQQSETKLSIPQLSVTDYEIMEQRLGELQALQSSLQEQQSGLYYLSTTVKEMSKKAPSEISRKYQSEFEEIEGRWKKLSSQLVEHCQKLEEQMNKLRKIQNHIQTLKKWMAEVDVFLKEEWPALGDSEILKKQLKQCRLLVSDIQTIQPSLNSVNEGGQKIKNEAEPEFASRLETELKELNTQWDHMCQQVYARKEALKGGLEKTVSLQKDLSEMHEWMTQAEEEYLERDFEYKTPDELQKAVEEMKRAKEEAQQKEAKVKLLTESVNSVIAQAPPVAQEALKKELETLTTNYQWLCTRLNGKCKTLEEVWACWHELLSYLEKANKWLNEVEFKLKTTENIPGGAEEISEVLDSLENLMRHSEDNPNQIRILAQTLTDGGVMDELINEELETFNSRWRELHEEAVRRQKLLEQSIQSAQETEKSLHLIQESLTFIDKQLAAYIADKVDAAQMPQEAQKIQSDLTSHEISLEEMKKHNQGKEAAQRVLSQIDVAQKKLQDVSMKFRLFQKPANFEQRLQESKMILDEVKMHLPALETKSVEQEVVQSQLNHCVNLYKSLSEVKSEVEMVIKTGRQIVQKKQTENPKELDERVTALKLHYNELGAKVTERKQQLEKCLKLSRKMRKEMNVLTEWLAATDMELTKRSAVEGMPSNLDSEVAWGKATQKEIEKQKVHLKSITEVGEALKTVLGKKETLVEDKLSLLNSNWIAVTSRAEEWLNLLLEYQKHMETFDQNVDHITKWIIQADTLLDESEKKKPQQKEDVLKRLKAELNDIRPKVDSTRDQAANLMANRGDHCRKLVEPQISELNHRFAAISHRIKTGKASIPLKELEQFNSDIQKLLEPLEAEIQQGVNLKEEDFNKDMNEDNEGTVKELLQRGDNLQQRITDERKREEIKIKQQLLQTKHNALKDLRSQRRKKALEISHQWYQYKRQADDLLKCLDDIEKKLASLPEPRDERKIKEIDRELQKKKEELNAVRRQAEGLSEDGAAMAVEPTQIQLSKRWREIESKFAQFRRLNFAQIHTVREETMMVMTEDMPLEISYVPSTYLTEITHVSQALLEVEQLLNAPDLCAKDFEDLFKQEESLKNIKDSLQQSSGRIDIIHSKKTAALQSATPVERVKLQEALSQLDFQWEKVNKMYKDRQGRFDRSVEKWRRFHYDIKIFNQWLTEAEQFLRKTQIPENWEHAKYKWYLKELQDGIGQRQTVVRTLNATGEEIIQQSSKTDASILQEKLGSLNLRWQEVCKQLSDRKKRLEEQKNILSEFQRDLNEFVLWLEEADNIASIPLEPGKEQQLKEKLEQVKLLVEELPLRQGILKQLNETGGPVLVSAPISPEEQDKLENKLKQTNLQWIKVSRALPEKQGEIEAQIKDLGQLEKKLEDLEEQLNHLLLWLSPIRNQLEIYNQPNQEGPFDVKETEIAVQAKQPDVEEILSKGQHLYKEKPATQPVKRKLEDLSSEWKAVNRLLQELRAKQPDLAPGLTTIGASPTQTVTLVTQPVVTKETAISKLEMPSSLMLEVPALADFNRAWTELTDWLSLLDQVIKSQRVMVGDLEDINEMIIKQKATMQDLEQRRPQLEELITAAQNLKNKTSNQEARTIITDRIERIQNQWDEVQEHLQNRRQQLNEMLKDSTQWLEAKEEAEQVLGQARAKLESWKEGPYTVDAIQKKITETKQLAKDLRQWQTNVDVANDLALKLLRDYSADDTRKVHMITENINASWRSIHKRVSEREAALEETHRLLQQFPLDLEKFLAWLTEAETTANVLQDATRKERLLEDSKGVKELMKQWQDLQGEIEAHTDVYHNLDENSQKILRSLEGSDDAVLLQRRLDNMNFKWSELRKKSLNIRSHLEASSDQWKRLHLSLQELLVWLQLKDDELSRQAPIGGDFPAVQKQNDVHRAFKRELKTKEPVIMSTLETVRIFLTEQPLEGLEKLYQEPRELPPEERAQNVTRLLRKQAEEVNTEWEKLNLHSADWQRKIDETLERLRELQEATDELDLKLRQAEVIKGSWQPVGDLLIDSLQDHLEKVKALRGEIAPLKENVSHVNDLARQLTTLGIQLSPYNLSTLEDLNTRWKLLQVAVEDRVRQLHEAHRDFGPASQHFLSTSVQGPWERAISPNKVPYYINHETQTTCWDHPKMTELYQSLADLNNVRFSAYRTAMKLRRLQKALCLDLLSLSAACDALDQHNLKQNDQPMDILQIINCLTTIYDRLEQEHNNLVNVPLCVDMCLNWLLNVYDTGRTGRIRVLSFKTGIISLCKAHLEDKYRYLFKQVASSTGFCDQRRLGLLLHDSIQIPRQLGEVASFGGSNIEPSVRSCFQFANNKPEIEAALFLDWMRLEPQSMVWLPVLHRVAAAETAKHQAKCNICKECPIIGFRYRSLKHFNYDICQSCFFSGRVAKGHKMHYPMVEYCTPTTSGEDVRDFAKVLKNKFRTKRYFAKHPRMGYLPVQTVLEGDNMETPASSPQLSHDDTHSRIEHYASRLAEMENSNGSYLNDSISPNESIDDEHLLIQHYCQSLNQDSPLSQPRSPAQILISLESEERGELERILADLEEENRNLQAEYDRLKQQHEHKGLSPLPSPPEMMPTSPQSPRDAELIAEAKLLRQHKGRLEARMQILEDHNKQLESQLHRLRQLLEQPQAEAKVNGTTVSSPSTSLQRSDSSQPMLLRVVGSQTSDSMGEEDLLSPPQDTSTGLEEVMEQLNNSFPSSRGRNTPGKPMREDTM

SEQ ID NO: 58 - DNA, 13923 bp, Homo sapiens
actttccccctacaggactcagatctgggaggcaattaccttcggagaaaaacgaataggaaaaactgaagtgttactttttttaaagctgctgaagtttgttggtttctcattgtttttaagcctactggagcaataaagtttgaagaacttttaccaggttttttttatcgctgccttgatatacacttttcaaaatgctttggtgggaagaagtagaggactgttatgaaagagaagatgttcaaaagaaaacattcacaaaatgggtaaatgcacaattttctaagtttgggaagcagcatattgagaacctcttcagtgacctacaggatgggaggcgcctcctagacctcctcgaaggcctgacagggcaaaaactgccaaaagaaaaaggatccacaagagttcatgccctgaacaatgtcaacaaggcactgcgggttttgcagaacaataatgttgatttagtgaatattggaagtactgacatcgtagatggaaatcataaactgactcttggtttgatttggaatataatcctccactggcaggtcaaaaatgtaatgaaaaatatcatggctggattgcaacaaaccaacagtgaaaagattctcctgagctgggtccgacaatcaactcgtaattatccacaggttaatgtaatcaacttcaccaccagctggtctgatggcctggctttgaatgctctcatccatagtcataggccagacctatttgactggaatagtgtggtttgccagcagtcagccacacaacgactggaacatgcattcaacatcgccagatatcaattaggcatagagaaactactcgatcctgaagatgttgataccacctatccagataagaagtccatcttaatgtacatcacatcactcttccaagttttgcctcaacaagtgagcattgaagccatccaggaagtggaaatgttgccaaggccacctaaagtgactaaagaagaacattttcagttacatcatcaaatgcactattctcaacagatcacggtcagtctagcacagggatatgagagaacttcttcccctaagcctcgattcaagagctatgcctacacacaggctgcttatgtcaccacctctgaccctacacggagcccatttccttcacagcatttggaagctcctgaagacaagtcatttggcagttcattgatggagagtgaagtaaacctggaccgttatcaaacagctttagaagaagtattatcgtggcttctttctgctgaggacacattgcaagcacaaggagagatttctaatgatgtggaagtggtgaaagaccagtttcatactcatgaggggtacatgatggatttgacagcccatcagggccgggttggtaatattctacaattgggaagtaagctgattggaacaggaaaattatcagaagatgaagaaactgaagtacaagagcagatgaatctcctaaattcaagatgggaatgcctcagggtagctagcatggaaaaacaaagcaatttacatagagttttaatggatctccagaatcagaaactgaaagagttgaatgactggctaacaaaaacagaagaaagaacaaggaaaatggaggaagagcctcttggacctgatcttgaagacctaaaacgccaagtacaacaacataaggtgcttcaagaagatctagaacaagaacaagtcagggtcaattctctcactcacatggtggtggtagttgatgaatctagtggagatcacgcaactgctgctttggaagaacaacttaaggtattgggagatcgatgggcaaacatctgtagatggacagaagaccgctgggttcttttacaagacatccttctcaaatggcaacgtcttactgaagaacagtgcctttttagtgcatggctttcagaaaaagaagatgcagtgaacaagattcacacaactggctttaaagatcaaaatgaaatgttatcaagtcttcaaaaactggccgttttaaaagcggatctagaaaagaaaaagcaatccatgggcaaactgtattcactcaaacaagatcttctttcaacactgaagaataagtcagtgacccagaagacggaagcatggctggataactttgcccggtgttgggataatttagtccaaaaacttgaaaagagtacagcacagatttcacaggctgtcaccaccactcagccatcactaacacagacaactgtaatggaaacagtaactacggtgaccacaagggaacagatcctggtaaagcatgctcaagaggaacttccaccaccacctccccaaaagaagaggcagattactgtggattctgaaattaggaaaaggttggatgttgatataactgaacttcacagctggattactcgctcagaagctgtgttgcagagtcctgaatttgcaatctttcggaaggaaggcaacttctcagacttaaaagaaaaagtcaatgccatagagcgagaaaaagctgagaagttcagaaaactgcaagatgccagcagatcagctcaggccctggtggaacagatggtgaatgagggtgttaatgcagatagcatcaaacaagcctcagaacaactgaacagccggtggatcgaattctgccagttgctaagtgagagacttaactggctggagtatcagaacaacatcatcgctttctataatcagctacaacaattggagcagatgacaactactgctgaaaactggttgaaaatccaacccaccaccccatcagagccaacagcaattaaaagtcagttaaaaatttgtaaggatgaagtcaaccggctatcagatcttcaacctcaaattgaacgattaaaaattcaaagcatagccctgaaagagaaaggacaaggacccatgttcctggatgcagactttgtggcctttacaaatcattttaagcaagtcttttctgatgtgcaggccagagagaaagagctacagacaatttttgacactttgccaccaatgcgctatcaggagaccatgagtgccatcaggacatgggtccagcagtcagaaaccaaactctccatacctcaacttagtgtcaccgactatgaaatcatggagcagagactcggggaattgcaggctttacaaagttctctgcaagagcaacaaagtggcctatactatctcagcaccactgtgaaagagatgtcgaagaaagcgccctctgaaattagccggaaatatcaatcagaatttgaagaaattgagggacgctggaagaagctctcctcccagctggttgagcattgtcaaaagctagaggagcaaatgaataaactccgaaaaattcagaatcacatacaaaccctgaagaaatggatggctgaagttgatgtttttctgaaggaggaatggcctgcccttggggattcagaaattctaaaaaagcagctgaaacagtgcagacttttagtcagtgatattcagacaattcagcccagtctaaacagtgtcaatgaaggtgggcagaagataaagaatgaagcagagccagagtttgcttcgagacttgagacagaactcaaagaacttaacactcagtgggatcacatgtgccaacaggtctatgccagaaaggaggccttgaagggaggtttggagaaaactgtaagcctccagaaagatctatcagagatgcacgaatggatgacacaagctgaagaagagtatcttgagagagattttgaatataaaactccagatgaattacagaaagcagttgaagagatgaagagagctaaagaagaggcccaacaaaaagaagcgaaagtgaaactccttactgagtctgtaaatagtgtcatagctcaagctccacctgtagcacaagaggccttaaaaaaggaacttgaaactctaaccaccaactaccagtggctctgcactaggctgaatgggaaatgcaagactttggaagaagtttgggcatgttggcatgagttattgtcatacttggagaaagcaaacaagtggctaaatgaagtagaatttaaacttaaaaccactgaaaacattcctggcggagctgaggaaatctctgaggtgctagattcacttgaaaatttgatgcgacattcagaggataacccaaatcagattcgcatattggcacagaccctaacagatggcggagtcatggatgagctaatcaatgaggaacttgagacatttaattctcgttggagggaactacatgaagaggctgtaaggaggcaaaagttgcttgaacagagcatccagtctgcccaggagactgaaaaatccttacacttaatccaggagtccctcacattcattgacaagcagttggcagcttatattgcagacaaggtggacgcagctcaaatgcctcaggaagcccagaaaatccaatctgatttgacaagtcatgagatcagtttagaagaaatgaagaaacataatcaggggaaggaggctgcccaaagagtcctgtctcagattgatgttgcacagaaaaaattacaagatgtctccatgaagtttcgattattccagaaaccagccaattttgagcagcgtctacaagaaagtaagatgattttagatgaagtgaagatgcacttgcctgcattggaaacaaagagtgtggaacaggaagtagtacagtcacagctaaatcattgtgtgaacttgtataaaagtctgagtgaagtgaagtctgaagtggaaatggtgataaagactggacgtcagattgtacagaaaaagcagacggaaaatcccaaagaacttgatgaaagagtaacagctttgaaattgcattataatgagctgggagcaaaggtaacagaaagaaagcaacagttggagaaatgcttgaaattgtcccgtaagatgcgaaaggaaatgaatgtcttgacagaatggctggcagctacagatatggaattgacaaagagatcagcagttgaaggaatgcctagtaatttggattctgaagttgcctggggaaaggctactcaaaaagagattgagaaacagaaggtgcacctgaagagtatcacagaggtaggagaggccttgaaaacagttttgggcaagaaggagacgttggtggaagataaactcagtcttctgaatagtaactggatagctgtcacctcccgagcagaagagtggttaaatcttttgttggaataccagaaacacatggaaacttttgaccagaatgtggaccacatcacaaagtggatcattcaggctgacacacttttggatgaatcagagaaaaagaaaccccagcaaaaagaagacgtgcttaagcgtttaaaggcagaactgaatgacatacgcccaaaggtggactctacacgtgaccaagcagcaaacttgatggcaaaccgcggtgaccactgcaggaaattagtagagccccaaatctcagagctcaaccatcgatttgcagccatttcacacagaattaagactggaaaggcctccattcctttgaaggaattggagcagtttaactcagatatacaaaaattgcttgaaccactggaggctgaaattcagcagggggtgaatctgaaagaggaagacttcaataaagatatgaatgaagacaatgagggtactgtaaaagaattgttgcaaagaggagacaacttacaacaaagaatcacagatgagagaaagcgagaggaaataaagataaaacagcagctgttacagacaaaacataatgctctcaaggatttgaggtctcaaagaagaaaaaaggctctagaaatttctcatcagtggtatcagtacaagaggcaggctgatgatctcctgaaatgcttggatgacattgaaaaaaaattagccagcctacctgagcccagagatgaaaggaaaataaaggaaattgatcgggaattgcagaagaagaaagaggagctgaatgcagtgcgtaggcaagctgagggcttgtctgaggatggggccgcaatggcagtggagccaactcagatccagctcagcaagcgctggcgggaaattgagagcaaatttgctcagtttcgaagactcaactttgcacaaattcacactgtccgtgaagaaacgatgatggtgatgactgaagacatgcctttggaaatttcttatgtgccttctacttatttgactgaaatcactcatgtctcacaagccctattagaagtggaacaacttctcaatgctcctgacctctgtgctaaggactttgaagatctctttaagcaagaggagtctctgaagaatataaaagatagtctacaacaaagctcaggtcggattgacattattcatagcaagaagacagcagcattgcaaagtgcaacgcctgtggaaagggtgaagctacaggaagctctctcccagcttgatttccaatgggaaaaagttaacaaaatgtacaaggaccgacaagggcgatttgacagatctgttgagaaatggcggcgttttcattatgatataaagatatttaatcagtggctaacagaagctgaacagtttctcagaaagacacaaattcctgagaattgggaacatgctaaatacaaatggtatcttaaggaactccaggatggcattgggcagcggcaaactgttgtcagaacattgaatgcaactggggaagaaataattcagcaatcctcaaaaacagatgccagtattctacaggaaaaattgggaagcctgaatctgcggtggcaggaggtctgcaaacagctgtcagacagaaaaaagaggctagaagaacaaaagaatatcttgtcagaatttcaaagagatttaaatgaatttgttttatggttggaggaagcagataacattgctagtatcccacttgaacctggaaaagagcagcaactaaaagaaaagcttgagcaagtcaagttactggtggaagagttgcccctgcgccagggaattctcaaacaattaaatgaaactggaggacccgtgcttgtaagtgctcccataagcccagaagagcaagataaacttgaaaataagctcaagcagacaaatctccagtggataaaggtttccagagctttacctgagaaacaaggagaaattgaagctcaaataaaagaccttgggcagcttgaaaaaaagcttgaagaccttgaagagcagttaaatcatctgctgctgtggttatctcctattaggaatcagttggaaatttataaccaaccaaaccaagaaggaccatttgacgttaaggaaactgaaatagcagttcaagctaaacaaccggatgtggaagagattttgtctaaagggcagcatttgtacaaggaaaaaccagccactcagccagtgaagaggaagttagaagatctgagctctgagtggaaggcggtaaaccgtttacttcaagagctgagggcaaagcagcctgacctagctcctggactgaccactattggagcctctcctactcagactgttactctggtgacacaacctgtggttactaaggaaactgccatctccaaactagaaatgccatcttccttgatgttggaggtacctgctctggcagatttcaaccgggcttggacagaacttaccgactggctttctctgcttgatcaagttataaaatcacagagggtgatggtgggtgaccttgaggatatcaacgagatgatcatcaagcagaaggcaacaatgcaggatttggaacagaggcgtccccagttggaagaactcattaccgctgcccaaaatttgaaaaacaagaccagcaatcaagaggctagaacaatcattacggatcgaattgaaagaattcagaatcagtgggatgaagtacaagaacaccttcagaaccggaggcaacagttgaatgaaatgttaaaggattcaacacaatggctggaagctaaggaagaagctgagcaggtcttaggacaggccagagccaagcttgagtcatggaaggagggtccctatacagtagatgcaatccaaaagaaaatcacagaaaccaagcagttggccaaagacctccgccagtggcagacaaatgtagatgtggcaaatgacttggccctgaaacttctccgggattattctgcagatgataccagaaaagtccacatgataacagagaatatcaatgcctcttggagaagcattcataaaagggtgagtgagcgagaggctgctttggaagaaactcatagattactgcaacagttccccctggacctggaaaagtttcttgcctggcttacagaagctgaaacaactgccaatgtcctacaggatgctacccgtaaggaaaggctcctagaagactccaagggagtaaaagagctgatgaaacaatggcaagacctccaaggtgaaattgaagctcacacagatgtttatcacaacctggatgaaaacagccaaaaaatcctgagatccctggaaggttccgatgatgcagtcctgttacaaagacgtttggataacatgaacttcaagtggagtgaacttcggaaaaagtctctcaacattaggtcccatttggaagccagttctgaccagtggaagcgtctgcacctttctctgcaggaacttctggtgtggctacagctgaaagatgatgaattaagccggcaggcacctattggaggcgactttccagcagttcagaagcagaacgatgtacatagggccttcaagagggaattgaaaactaaagaacctgtaatcatgagtactcttgagactgtacgaatatttctgacagagcagcctttggaaggactagagaaactctaccaggagcccagagagctgcctcctgaggagagagcccagaatgtcactcggcttctacgaaagcaggctgaggaggtcaatactgagtgggaaaaattgaacctgcactccgctgactggcagagaaaaatagatgagacccttgaaagactccgggaacttcaagaggccacggatgagctggacctcaagctgcgccaagctgaggtgatcaagggatcctggcagcccgtgggcgatctcctcattgactctctccaagatcacctcgagaaagtcaaggcacttcgaggagaaattgcgcctctgaaagagaacgtgagccacgtcaatgaccttgctcgccagcttaccactttgggcattcagctctcaccgtataacctcagcactctggaagacctgaacaccagatggaagcttctgcaggtggccgtcgaggaccgagtcaggcagctgcatgaagcccacagggactttggtccagcatctcagcactttctttccacgtctgtccagggtccctgggagagagccatctcgccaaacaaagtgccctactatatcaaccacgagactcaaacaacttgctgggaccatcccaaaatgacagagctctaccagtctttagctgacctgaataatgtcagattctcagcttataggactgccatgaaactccgaagactgcagaaggccctttgcttggatctcttgagcctgtcagctgcatgtgatgccttggaccagcacaacctcaagcaaaatgaccagcccatggatatcctgcagattattaattgtttgaccactatttatgaccgcctggagcaagagcacaacaatttggtcaacgtccctctctgcgtggatatgtgtctgaactggctgctgaatgtttatgatacgggacgaacagggaggatccgtgtcctgtcttttaaaactggcatcatttccctgtgtaaagcacatttggaagacaagtacagataccttttcaagcaagtggcaagttcaacaggattttgtgaccagcgcaggctgggcctccttctgcatgattctatccaaattccaagacagttgggtgaagttgcatcctttgggggcagtaacattgagccaagtgtccggagctgcttccaatttgctaataataagccagagatcgaagcggccctcttcctagactggatgagactggaaccccagtccatggtgtggctgcccgtcctgcacagagtggctgctgcagaaactgccaagcatcaggccaaatgtaacatctgcaaagagtgtccaatcattggattcaggtacaggagtctaaagcactttaattatgacatctgccaaagctgctttttttctggtcgagttgcaaaaggccataaaatgcactatcccatggtggaatattgcactccgactacatcaggagaagatgttcgagactttgccaaggtactaaaaaacaaatttcgaaccaaaaggtattttgcgaagcatccccgaatgggctacctgccagtgcagactgtcttagagggggacaacatggaaactcccgttactctgatcaacttctggccagtagattctgcgcctgcctcgtcccctcagctttcacacgatgatactcattcacgcattgaacattatgctagcaggctagcagaaatggaaaacagcaatggatcttatctaaatgatagcatctctcctaatgagagcatagatgatgaacatttgttaatccagcattactgccaaagtttgaaccaggactcccccctgagccagcctcgtagtcctgcccagatcttgatttccttagagagtgaggaaagaggggagctagagagaatcctagcagatcttgaggaagaaaacaggaatctgcaagcagaatatgaccgtctaaagcagcagcacgaacataaaggcctgtccccactgccgtcccctcctgaaatgatgcccacctctccccagagtccccgggatgctgagctcattgctgaggccaagctactgcgtcaacacaaaggccgcctggaagccaggatgcaaatcctggaagaccacaataaacagctggagtcacagttacacaggctaaggcagctgctggagcaaccccaggcagaggccaaagtgaatggcacaacggtgtcctctccttctacctctctacagaggtccgacagcagtcagcctatgctgctccgagtggttggcagtcaaacttcggactccatgggtgaggaagatcttctcagtcctccccaggacacaagcacagggttagaggaggtgatggagcaactcaacaactccttccctagttcaagaggacacaatgtaggaagtcttttccacatggcagatgatttgggcagagcgatggagtccttagtatcagtcatgacagatgaagaaggagcagaataaatgttttacaactcctgattcccgcatggtttttataatattcatacaacaaagaggattagacagtaagagtttacaagaaataaatctatatttttgtgaagggtagtggtattatactgtagatttcagtagtttctaagtctgttattgttttgttaacaatggcaggttttacacgtctatgcaattgtacaaaaaagttataagaaaactacatgtaaaatcttgatagctaaataacttgccatttctttatatggaacgcattttgggttgtttaaaaatttataacagttataaagaaagattgtaaactaaagtgtgctttataaaaaaaagttgtttataaaaacccctaaaaacaaaacaaacacacacacacacacatacacacacacacacaaaactttgaggcagcgcattgttttgcatccttttggcgtgatatccatatgaaattcatggctttttctttttttgcatattaaagataagacttcctctaccaccacaccaaatgactactacacactgctcatttgagaactgtcagctgagtggggcaggcttgagttttcatttcatatatctatatgtctataagtatataaatactatagttatatagataaagagatacgaatttctatagactgactttttccattttttaaatgttcatgtcacatcctaatagaaagaaattacttctagtcagtcatccaggcttacctgcttggtctagaatggatttttcccggagccggaagccaggaggaaactacaccacactaaaacattgtctacagctccagatgtttctcattttaaacaactttccactgacaacgaaagtaaagtaaagtattggatttttttaaagggaacatgtgaatgaatacacaggacttattatatcagagtgagtaatcggttggttggttgattgattgattgattgatacattcagcttcctgctgctagcaatgccacgatttagatttaatgatgcttcagtggaaatcaatcagaaggtattctgaccttgtgaacatcagaaggtattttttaactcccaagcagtagcaggacgatgatagggctggagggctatggattcccagcccatccctgtgaaggagtaggccactctttaagtgaaggattggatgattgttcataatacataaagttctctgtaattacaactaaattattatgccctcttctcacagtcaaaaggaactgggtggtttggtttttgttgcttttttagatttattgtcccatgtgggatgagtttttaaatgccacaagacataatttaaaataaataaactttgggaaaaggtgtaaaacagtagccccatcacatttgtgatactgacaggtatcaacccagaagcccatgaactgtgtttccatcctttgcatttctctgcgagtagttccacacaggtttgtaagtaagtaagaaagaaggcaaattgattcaaatgttacaaaaaaacccttcttggtggattagacaggttaaatatataaacaaacaaacaaaaattgctcaaaaaagaggagaaaagctcaagaggaaaagctaaggactggtaggaaaaagctttactctttcatgccattttatttctttttgatttttaaatcattcattcaatagataccaccgtgtgacctataattttgcaaatctgttacctctgacatcaagtgtaattagcttttggagagtgggctgacatcaagtgtaattagcttttggagagtgggttttgtccattattaataattaattaattaacatcaaacacggcttctcatgctatttctacctcactttggttttggggtgttcctgataattgtgcacacctgagttcacagcttcaccacttgtccattgcgttattttctttttcctttataattctttctttttccttcataattttcaaaagaaaacccaaagctctaaggtaacaaattaccaaattacatgaagatttggtttttgtcttgcatttttttcctttatgtgacgctggaccttttctttacccaaggatttttaaaactcagatttaaaacaaggggttactttacatcctactaagaagtttaagtaagtaagtttcattctaaaatcagaggtaaatagagtgcataaataattttgttttaatctttttgtttttcttttagacacattagctctggagtgagtctgtcataatatttgaacaaaaattgagagctttattgctgcattttaagcataattaatttggacattatttcgtgttgtgttctttataaccaccaagtattaaactgtaaatcataatgtaactgaagcataaacatcacatggcatgttttgtcattgttttcaggtactgagttcttacttgagtatcataatatattgtgttttaacaccaacactgtaacatttacgaattatttttttaaacttcagttttactgcattttcacaacatatcagacttcaccaaatatatgccttactattgtattatagtactgctttactgtgtatctcaataaagcacgcagttatgttacaaaaaagta

SEQ ID NO: 59 - protein, 3703 aa, Homo sapiens
MLWWEEVEDCYEREDVQKKTFTKWVNAQFSKFGKQHIENLFSDLQDGRRLLDLLEGLTGQKLPKEKGSTRVHALNNVNKALRVLQNNNVDLVNIGSTDIVDGNHKLTLGLIWNIILHWQVKNVMKNIMAGLQQTNSEKILLSWVRQSTRNYPQVNVINFTTSWSDGLALNALIHSHRPDLFDWNSVVCQQSATQRLEHAFNIARYQLGIEKLLDPEDVDTTYPDKKSILMYITSLFQVLPQQVSIEAIQEVEMLPRPPKVTKEEHFQLHHQMHYSQQITVSLAQGYERTSSPKPRFKSYAYTQAAYVTTSDPTRSPFPSQHLEAPEDKSFGSSLMESEVNLDRYQTALEEVLSWLLSAEDTLQAQGEISNDVEVVKDQFHTHEGYMMDLTAHQGRVGNILQLGSKLIGTGKLSEDEETEVQEQMNLLNSRWECLRVASMEKQSNLHRVLMDLQNQKLKELNDWLTKTEERTRKMEEEPLGPDLEDLKRQVQQHKVLQEDLEQEQVRVNSLTHMVVVVDESSGDHATAALEEQLKVLGDRWANICRWTEDRWVLLQDILLKWQRLTEEQCLFSAWLSEKEDAVNKIHTTGFKDQNEMLSSLQKLAVLKADLEKKKQSMGKLYSLKQDLLSTLKNKSVTQKTEAWLDNFARCWDNLVQKLEKSTAQISQAVTTTQPSLTQTTVMETVTTVTTREQILVKHAQEELPPPPPQKKRQITVDSEIRKRLDVDITELHSWITRSEAVLQSPEFAIFRKEGNFSDLKEKVNAIEREKAEKFRKLQDASRSAQALVEQMVNEGVNADSIKQASEQLNSRWIEFCQLLSERLNWLEYQNNIIAFYNQLQQLEQMTTTAENWLKIQPTTPSEPTAIKSQLKICKDEVNRLSDLQPQIERLKIQSIALKEKGQGPMFLDADFVAFTNHFKQVFSDVQAREKELQTIFDTLPPMRYQETMSAIRTWVQQSETKLSIPQLSVTDYEIMEQRLGELQALQSSLQEQQSGLYYLSTTVKEMSKKAPSEISRKYQSEFEEIEGRWKKLSSQLVEHCQKLEEQMNKLRKIQNHIQTLKKWMAEVDVFLKEEWPALGDSEILKKQLKQCRLLVSDIQTIQPSLNSVNEGGQKIKNEAEPEFASRLETELKELNTQWDHMCQQVYARKEALKGGLEKTVSLQKDLSEMHEWMTQAEEEYLERDFEYKTPDELQKAVEEMKRAKEEAQQKEAKVKLLTESVNSVIAQAPPVAQEALKKELETLTTNYQWLCTRLNGKCKTLEEVWACWHELLSYLEKANKWLNEVEFKLKTTENIPGGAEEISEVLDSLENLMRHSEDNPNQIRILAQTLTDGGVMDELINEELETFNSRWRELHEEAVRRQKLLEQSIQSAQETEKSLHLIQESLTFIDKQLAAYIADKVDAAQMPQEAQKIQSDLTSHEISLEEMKKHNQGKEAAQRVLSQIDVAQKKLQDVSMKFRLFQKPANFEQRLQESKMILDEVKMHLPALETKSVEQEVVQSQLNHCVNLYKSLSEVKSEVEMVIKTGRQIVQKKQTENPKELDERVTALKLHYNELGAKVTERKQQLEKCLKLSRKMRKEMNVLTEWLAATDMELTKRSAVEGMPSNLDSEVAWGKATQKEIEKQKVHLKSITEVGEALKTVLGKKETLVEDKLSLLNSNWIAVTSRAEEWLNLLLEYQKHMETFDQNVDHITKWIIQADTLLDESEKKKPQQKEDVLKRLKAELNDIRPKVDSTRDQAANLMANRGDHCRKLVEPQISELNHRFAAISHRIKTGKASIPLKELEQFNSDIQKLLEPLEAEIQQGVNLKEEDFNKDMNEDNEGTVKELLQRGDNLQQRITDERKREEIKIKQQLLQTKHNALKDLRSQRRKKALEISHQWYQYKRQADDLLKCLDDIEKKLASLPEPRDERKIKEIDRELQKKKEELNAVRRQAEGLSEDGAAMAVEPTQIQLSKRWREIESKFAQFRRLNFAQIHTVREETMMVMTEDMPLEISYVPSTYLTEITHVSQALLEVEQLLNAPDLCAKDFEDLFKQEESLKNIKDSLQQSSGRIDIIHSKKTAALQSATPVERVKLQEALSQLDFQWEKVNKMYKDRQGRFDRSVEKWRRFHYDIKIFNQWLTEAEQFLRKTQIPENWEHAKYKWYLKELQDGIGQRQTVVRTLNATGEEIIQQSSKTDASILQEKLGSLNLRWQEVCKQLSDRKKRLEEQKNILSEFQRDLNEFVLWLEEADNIASIPLEPGKEQQLKEKLEQVKLLVEELPLRQGILKQLNETGGPVLVSAPISPEEQDKLENKLKQTNLQWIKVSRALPEKQGEIEAQIKDLGQLEKKLEDLEEQLNHLLLWLSPIRNQLEIYNQPNQEGPFDVKETEIAVQAKQPDVEEILSKGQHLYKEKPATQPVKRKLEDLSSEWKAVNRLLQELRAKQPDLAPGLTTIGASPTQTVTLVTQPVVTKETAISKLEMPSSLMLEVPALADFNRAWTELTDWLSLLDQVIKSQRVMVGDLEDINEMIIKQKATMQDLEQRRPQLEELITAAQNLKNKTSNQEARTIITDRIERIQNQWDEVQEHLQNRRQQLNEMLKDSTQWLEAKEEAEQVLGQARAKLESWKEGPYTVDAIQKKITETKQLAKDLRQWQTNVDVANDLALKLLRDYSADDTRKVHMITENINASWRSIHKRVSEREAALEETHRLLQQFPLDLEKFLAWLTEAETTANVLQDATRKERLLEDSKGVKELMKQWQDLQGEIEAHTDVYHNLDENSQKILRSLEGSDDAVLLQRRLDNMNFKWSELRKKSLNIRSHLEASSDQWKRLHLSLQELLVWLQLKDDELSRQAPIGGDFPAVQKQNDVHRAFKRELKTKEPVIMSTLETVRIFLTEQPLEGLEKLYQEPRELPPEERAQNVTRLLRKQAEEVNTEWEKLNLHSADWQRKIDETLERLRELQEATDELDLKLRQAEVIKGSWQPVGDLLIDSLQDHLEKVKALRGEIAPLKENVSHVNDLARQLTTLGIQLSPYNLSTLEDLNTRWKLLQVAVEDRVRQLHEAHRDFGPASQHFLSTSVQGPWERAISPNKVPYYINHETQTTCWDHPKMTELYQSLADLNNVRFSAYRTAMKLRRLQKALCLDLLSLSAACDALDQHNLKQNDQPMDILQIINCLTTIYDRLEQEHNNLVNVPLCVDMCLNWLLNVYDTGRTGRIRVLSFKTGIISLCKAHLEDKYRYLFKQVASSTGFCDQRRLGLLLHDSIQIPRQLGEVASFGGSNIEPSVRSCFQFANNKPEIEAALFLDWMRLEPQSMVWLPVLHRVAAAETAKHQAKCNICKECPIIGFRYRSLKHFNYDICQSCFFSGRVAKGHKMHYPMVEYCTPTTSGEDVRDFAKVLKNKFRTKRYFAKHPRMGYLPVQTVLEGDNMETPVTLINFWPVDSAPASSPQLSHDDTHSRIEHYASRLAEMENSNGSYLNDSISPNESIDDEHLLIQHYCQSLNQDSPLSQPRSPAQILISLESEERGELERILADLEEENRNLQAEYDRLKQQHEHKGLSPLPSPPEMMPTSPQSPRDAELIAEAKLLRQHKGRLEARMQILEDHNKQLESQLHRLRQLLEQPQAEAKVNGTTVSSPSTSLQRSDSSQPMLLRVVGSQTSDSMGEEDLLSPPQDTSTGLEEVMEQLNNSFPSSRGHNVGSLFHMADDLGRAMESLVSVMTDEEGAE

SEQ ID NO: 60 - DNA, 8499 bp, Homo sapiens
tttcatcagagcatcttcacacatcagtgttcactctctatagatttatttgcatattgtctaaatatgtttttttctgttattattttacactttttattttgcttcattctctgttgagttcctcaaacctttaaaaaggaaataaataacttattcacttaccctctaaattatattctatgtggacggtccctaataaataatgagttatcactccaaattgtttcaaatcccaagacaccagaggaatttagaagaaagaaaatgttagaccaatttcaatatttacttaattagaatatctaaaaccaagcattcaaaggataactgaaataatatttgggttattgagcgaggatgacagtcatgcctttcatatttgtaaacttcaaaggatgacaataaagggacaacagcctttgaaattttgagagaagtatttgctgcttgcaagtcggttgatgtggttagctaactgccctgggccctgtattggttttgctcaataggaaattgatcgggaattgcagaagaagaaagaggagctgaatgcagtgcgtaggcaagctgagggcttgtctgaggatggggccgcaatggcagtggagccaactcagatccagctcagcaagcgctggcgggaaattgagagcaaatttgctcagtttcgaagactcaactttgcacaaattcacactgtccgtgaagaaacgatgatggtgatgactgaagacatgcctttggaaatttcttatgtgccttctacttatttgactgaaatcactcatgtctcacaagccctattagaagtggaacaacttctcaatgctcctgacctctgtgctaaggactttgaagatctctttaagcaagaggagtctctgaagaatataaaagatagtctacaacaaagctcaggtcggattgacattattcatagcaagaagacagcagcattgcaaagtgcaacgcctgtggaaagggtgaagctacaggaagctctctcccagcttgatttccaatgggaaaaagttaacaaaatgtacaaggaccgacaagggcgatttgacagatctgttgagaaatggcggcgttttcattatgatataaagatatttaatcagtggctaacagaagctgaacagtttctcagaaagacacaaattcctgagaattgggaacatgctaaatacaaatggtatcttaaggaactccaggatggcattgggcagcggcaaactgttgtcagaacattgaatgcaactggggaagaaataattcagcaatcctcaaaaacagatgccagtattctacaggaaaaattgggaagcctgaatctgcggtggcaggaggtctgcaaacagctgtcagacagaaaaaagaggctagaagaacaaaagaatatcttgtcagaatttcaaagagatttaaatgaatttgttttatggttggaggaagcagataacattgctagtatcccacttgaacctggaaaagagcagcaactaaaagaaaagcttgagcaagtcaagttactggtggaagagttgcccctgcgccagggaattctcaaacaattaaatgaaactggaggacccgtgcttgtaagtgctcccataagcccagaagagcaagataaacttgaaaataagctcaagcagacaaatctccagtggataaaggtttccagagctttacctgagaaacaaggagaaattgaagctcaaataaaagaccttgggcagcttgaaaaaaagcttgaagaccttgaagagcagttaaatcatctgctgctgtggttatctcctattaggaatcagttggaaatttataaccaaccaaaccaagaaggaccatttgacgttaaggaaactgaaatagcagttcaagctaaacaaccggatgtggaagagattttgtctaaagggcagcatttgtacaaggaaaaaccagccactcagccagtgaagaggaagttagaagatctgagctctgagtggaaggcggtaaaccgtttacttcaagagctgagggcaaagcagcctgacctagctcctggactgaccactattggagcctctcctactcagactgttactctggtgacacaacctgtggttactaaggaaactgccatctccaaactagaaatgccatcttccttgatgttggaggtacctgctctggcagatttcaaccgggcttggacagaacttaccgactggctttctctgcttgatcaagttataaaatcacagagggtgatggtgggtgaccttgaggatatcaacgagatgatcatcaagcagaaggcaacaatgcaggatttggaacagaggcgtccccagttggaagaactcattaccgctgcccaaaatttgaaaaacaagaccagcaatcaagaggctagaacaatcattacggatcgaattgaaagaattcagaatcagtgggatgaagtacaagaacaccttcagaaccggaggcaacagttgaatgaaatgttaaaggattcaacacaatggctggaagctaaggaagaagctgagcaggtcttaggacaggccagagccaagcttgagtcatggaaggagggtccctatacagtagatgcaatccaaaagaaaatcacagaaaccaagcagttggccaaagacctccgccagtggcagacaaatgtagatgtggcaaatgacttggccctgaaacttctccgggattattctgcagatgataccagaaaagtccacatgataacagagaatatcaatgcctcttggagaagcattcataaaagggtgagtgagcgagaggctgctttggaagaaactcatagattactgcaacagttccccctggacctggaaaagtttcttgcctggcttacagaagctgaaacaactgccaatgtcctacaggatgctacccgtaaggaaaggctcctagaagactccaagggagtaaaagagctgatgaaacaatggcaagacctccaaggtgaaattgaagctcacacagatgtttatcacaacctggatgaaaacagccaaaaaatcctgagatccctggaaggttccgatgatgcagtcctgttacaaagacgtttggataacatgaacttcaagtggagtgaacttcggaaaaagtctctcaacattaggtcccatttggaagccagttctgaccagtggaagcgtctgcacctttctctgcaggaacttctggtgtggctacagctgaaagatgatgaattaagccggcaggcacctattggaggcgactttccagcagttcagaagcagaacgatgtacatagggccttcaagagggaattgaaaactaaagaacctgtaatcatgagtactcttgagactgtacgaatatttctgacagagcagcctttggaaggactagagaaactctaccaggagcccagagagctgcctcctgaggagagagcccagaatgtcactcggcttctacgaaagcaggctgaggaggtcaatactgagtgggaaaaattgaacctgcactccgctgactggcagagaaaaatagatgagacccttgaaagactccgggaacttcaagaggccacggatgagctggacctcaagctgcgccaagctgaggtgatcaagggatcctggcagcccgtgggcgatctcctcattgactctctccaagatcacctcgagaaagtcaaggcacttcgaggagaaattgcgcctctgaaagagaacgtgagccacgtcaatgaccttgctcgccagcttaccactttgggcattcagctctcaccgtataacctcagcactctggaagacctgaacaccagatggaagcttctgcaggtggccgtcgaggaccgagtcaggcagctgcatgaagcccacagggactttggtccagcatctcagcactttctttccacgtctgtccagggtccctgggagagagccatctcgccaaacaaagtgccctactatatcaaccacgagactcaaacaacttgctgggaccatcccaaaatgacagagctctaccagtctttagctgacctgaataatgtcagattctcagcttataggactgccatgaaactccgaagactgcagaaggccctttgcttggatctcttgagcctgtcagctgcatgtgatgccttggaccagcacaacctcaagcaaaatgaccagcccatggatatcctgcagattattaattgtttgaccactatttatgaccgcctggagcaagagcacaacaatttggtcaacgtccctctctgcgtggatatgtgtctgaactggctgctgaatgtttatgatacgggacgaacagggaggatccgtgtcctgtcttttaaaactggcatcatttccctgtgtaaagcacatttggaagacaagtacagataccttttcaagcaagtggcaagttcaacaggattttgtgaccagcgcaggctgggcctccttctgcatgattctatccaaattccaagacagttgggtgaagttgcatcctttgggggcagtaacattgagccaagtgtccggagctgcttccaatttgctaataataagccagagatcgaagcggccctcttcctagactggatgagactggaaccccagtccatggtgtggctgcccgtcctgcacagagtggctgctgcagaaactgccaagcatcaggccaaatgtaacatctgcaaagagtgtccaatcattggattcaggtacaggagtctaaagcactttaattatgacatctgccaaagctgctttttttctggtcgagttgcaaaaggccataaaatgcactatcccatggtggaatattgcactccgactacatcaggagaagatgttcgagactttgccaaggtactaaaaaacaaatttcgaaccaaaaggtattttgcgaagcatccccgaatgggctacctgccagtgcagactgtcttagagggggacaacatggaaactcccgttactctgatcaacttctggccagtagattctgcgcctgcctcgtcccctcagctttcacacgatgatactcattcacgcattgaacattatgctagcaggctagcagaaatggaaaacagcaatggatcttatctaaatgatagcatctctcctaatgagagcatagatgatgaacatttgttaatccagcattactgccaaagtttgaaccaggactcccccctgagccagcctcgtagtcctgcccagatcttgatttccttagagagtgaggaaagaggggagctagagagaatcctagcagatcttgaggaagaaaacaggaatctgcaagcagaatatgaccgtctaaagcagcagcacgaacataaaggcctgtccccactgccgtcccctcctgaaatgatgcccacctctccccagagtccccgggatgctgagctcattgctgaggccaagctactgcgtcaacacaaaggccgcctggaagccaggatgcaaatcctggaagaccacaataaacagctggagtcacagttacacaggctaaggcagctgctggagcaaccccaggcagaggccaaagtgaatggcacaacggtgtcctctccttctacctctctacagaggtccgacagcagtcagcctatgctgctccgagtggttggcagtcaaacttcggactccatgggtgaggaagatcttctcagtcctccccaggacacaagcacagggttagaggaggtgatggagcaactcaacaactccttccctagttcaagaggacacaatgtaggaagtcttttccacatggcagatgatttgggcagagcgatggagtccttagtatcagtcatgacagatgaagaaggagcagaataaatgttttacaactcctgattcccgcatggtttttataatattcatacaacaaagaggattagacagtaagagtttacaagaaataaatctatatttttgtgaagggtagtggtattatactgtagatttcagtagtttctaagtctgttattgttttgttaacaatggcaggttttacacgtctatgcaattgtacaaaaaagttataagaaaactacatgtaaaatcttgatagctaaataacttgccatttctttatatggaacgcattttgggttgtttaaaaatttataacagttataaagaaagattgtaaactaaagtgtgctttataaaaaaaagttgtttataaaaacccctaaaaacaaaacaaacacacacacacacacatacacacacacacacaaaactttgaggcagcgcattgttttgcatccttttggcgtgatatccatatgaaattcatggctttttctttttttgcatattaaagataagacttcctctaccaccacaccaaatgactactacacactgctcatttgagaactgtcagctgagtggggcaggcttgagttttcatttcatatatctatatgtctataagtatataaatactatagttatatagataaagagatacgaatttctatagactgactttttccattttttaaatgttcatgtcacatcctaatagaaagaaattacttctagtcagtcatccaggcttacctgcttggtctagaatggatttttcccggagccggaagccaggaggaaactacaccacactaaaacattgtctacagctccagatgtttctcattttaaacaactttccactgacaacgaaagtaaagtaaagtattggatttttttaaagggaacatgtgaatgaatacacaggacttattatatcagagtgagtaatcggttggttggttgattgattgattgattgatacattcagcttcctgctgctagcaatgccacgatttagatttaatgatgcttcagtggaaatcaatcagaaggtattctgaccttgtgaacatcagaaggtattttttaactcccaagcagtagcaggacgatgatagggctggagggctatggattcccagcccatccctgtgaaggagtaggccactctttaagtgaaggattggatgattgttcataatacataaagttctctgtaattacaactaaattattatgccctcttctcacagtcaaaaggaactgggtggtttggtttttgttgcttttttagatttattgtcccatgtgggatgagtttttaaatgccacaagacataatttaaaataaataaactttgggaaaaggtgtaaaacagtagccccatcacatttgtgatactgacaggtatcaacccagaagcccatgaactgtgtttccatcctttgcatttctctgcgagtagttccacacaggtttgtaagtaagtaagaaagaaggcaaattgattcaaatgttacaaaaaaacccttcttggtggattagacaggttaaatatataaacaaacaaacaaaaattgctcaaaaaagaggagaaaagctcaagaggaaaagctaaggactggtaggaaaaagctttactctttcatgccattttatttctttttgatttttaaatcattcattcaatagataccaccgtgtgacctataattttgcaaatctgttacctctgacatcaagtgtaattagcttttggagagtgggctgacatcaagtgtaattagcttttggagagtgggttttgtccattattaataattaattaattaacatcaaacacggcttctcatgctatttctacctcactttggttttggggtgttcctgataattgtgcacacctgagttcacagcttcaccacttgtccattgcgttattttctttttcctttataattctttctttttccttcataattttcaaaagaaaacccaaagctctaaggtaacaaattaccaaattacatgaagatttggtttttgtcttgcatttttttcctttatgtgacgctggaccttttctttacccaaggatttttaaaactcagatttaaaacaaggggttactttacatcctactaagaagtttaagtaagtaagtttcattctaaaatcagaggtaaatagagtgcataaataattttgttttaatctttttgtttttcttttagacacattagctctggagtgagtctgtcataatatttgaacaaaaattgagagctttattgctgcattttaagcataattaatttggacattatttcgtgttgtgttctttataaccaccaagtattaaactgtaaatcataatgtaactgaagcataaacatcacatggcatgttttgtcattgttttcaggtactgagttcttacttgagtatcataatatattgtgttttaacaccaacactgtaacatttacgaattatttttttaaacttcagttttactgcattttcacaacatatcagacttcaccaaatatatgccttactattgtattatagtactgctttactgtgtatctcaataaagcacgcagttatgttacaaaaaagta

SEQ ID NO: 61 - protein, 1761 aa, Homo sapiens
MAVEPTQIQLSKRWREIESKFAQFRRLNFAQIHTVREETMMVMTEDMPLEISYVPSTYLTEITHVSQALLEVEQLLNAPDLCAKDFEDLFKQEESLKNIKDSLQQSSGRIDIIHSKKTAALQSATPVERVKLQEALSQLDFQWEKVNKMYKDRQGRFDRSVEKWRRFHYDIKIFNQWLTEAEQFLRKTQIPENWEHAKYKWYLKELQDGIGQRQTVVRTLNATGEEIIQQSSKTDASILQEKLGSLNLRWQEVCKQLSDRKKRLEEQKNILSEFQRDLNEFVLWLEEADNIASIPLEPGKEQQLKEKLEQVKLLVEELPLRQGILKQLNETGGPVLVSAPISPEEQDKLENKLKQTNLQWIKVSRALPEKQGEIEAQIKDLGQLEKKLEDLEEQLNHLLLWLSPIRNQLEIYNQPNQEGPFDVKETEIAVQAKQPDVEEILSKGQHLYKEKPATQPVKRKLEDLSSEWKAVNRLLQELRAKQPDLAPGLTTIGASPTQTVTLVTQPVVTKETAISKLEMPSSLMLEVPALADFNRAWTELTDWLSLLDQVIKSQRVMVGDLEDINEMIIKQKATMQDLEQRRPQLEELITAAQNLKNKTSNQEARTIITDRIERIQNQWDEVQEHLQNRRQQLNEMLKDSTQWLEAKEEAEQVLGQARAKLESWKEGPYTVDAIQKKITETKQLAKDLRQWQTNVDVANDLALKLLRDYSADDTRKVHMITENINASWRSIHKRVSEREAALEETHRLLQQFPLDLEKFLAWLTEAETTANVLQDATRKERLLEDSKGVKELMKQWQDLQGEIEAHTDVYHNLDENSQKILRSLEGSDDAVLLQRRLDNMNFKWSELRKKSLNIRSHLEASSDQWKRLHLSLQELLVWLQLKDDELSRQAPIGGDFPAVQKQNDVHRAFKRELKTKEPVIMSTLETVRIFLTEQPLEGLEKLYQEPRELPPEERAQNVTRLLRKQAEEVNTEWEKLNLHSADWQRKIDETLERLRELQEATDELDLKLRQAEVIKGSWQPVGDLLIDSLQDHLEKVKALRGEIAPLKENVSHVNDLARQLTTLGIQLSPYNLSTLEDLNTRWKLLQVAVEDRVRQLHEAHRDFGPASQHFLSTSVQGPWERAISPNKVPYYINHETQTTCWDHPKMTELYQSLADLNNVRFSAYRTAMKLRRLQKALCLDLLSLSAACDALDQHNLKQNDQPMDILQIINCLTTIYDRLEQEHNNLVNVPLCVDMCLNWLLNVYDTGRTGRIRVLSFKTGIISLCKAHLEDKYRYLFKQVASSTGFCDQRRLGLLLHDSIQIPRQLGEVASFGGSNIEPSVRSCFQFANNKPEIEAALFLDWMRLEPQSMVWLPVLHRVAAAETAKHQAKCNICKECPIIGFRYRSLKHFNYDICQSCFFSGRVAKGHKMHYPMVEYCTPTTSGEDVRDFAKVLKNKFRTKRYFAKHPRMGYLPVQTVLEGDNMETPVTLINFWPVDSAPASSPQLSHDDTHSRIEHYASRLAEMENSNGSYLNDSISPNESIDDEHLLIQHYCQSLNQDSPLSQPRSPAQILISLESEERGELERILADLEEENRNLQAEYDRLKQQHEHKGLSPLPSPPEMMPTSPQSPRDAELIAEAKLLRQHKGRLEARMQILEDHNKQLESQLHRLRQLLEQPQAEAKVNGTTVSSPSTSLQRSDSSQPMLLRVVGSQTSDSMGEEDLLSPPQDTSTGLEEVMEQLNNSFPSSRGHNVGSLFHMADDLGRAMESLVSVMTDEEGAE

SEQ ID NO: 62 - DNA, 13875 bp, Homo sapiens
actttccccctacaggactcagatctgggaggcaattaccttcggagaaaaacgaataggaaaaactgaagtgttactttttttaaagctgctgaagtttgttggtttctcattgtttttaagcctactggagcaataaagtttgaagaacttttaccaggttttttttatcgctgccttgatatacacttttcaaaatgctttggtgggaagaagtagaggactgttatgaaagagaagatgttcaaaagaaaacattcacaaaatgggtaaatgcacaattttctaagtttgggaagcagcatattgagaacctcttcagtgacctacaggatgggaggcgcctcctagacctcctcgaaggcctgacagggcaaaaactgccaaaagaaaaaggatccacaagagttcatgccctgaacaatgtcaacaaggcactgcgggttttgcagaacaataatgttgatttagtgaatattggaagtactgacatcgtagatggaaatcataaactgactcttggtttgatttggaatataatcctccactggcaggtcaaaaatgtaatgaaaaatatcatggctggattgcaacaaaccaacagtgaaaagattctcctgagctgggtccgacaatcaactcgtaattatccacaggttaatgtaatcaacttcaccaccagctggtctgatggcctggctttgaatgctctcatccatagtcataggccagacctatttgactggaatagtgtggtttgccagcagtcagccacacaacgactggaacatgcattcaacatcgccagatatcaattaggcatagagaaactactcgatcctgaagatgttgataccacctatccagataagaagtccatcttaatgtacatcacatcactcttccaagttttgcctcaacaagtgagcattgaagccatccaggaagtggaaatgttgccaaggccacctaaagtgactaaagaagaacattttcagttacatcatcaaatgcactattctcaacagatcacggtcagtctagcacagggatatgagagaacttcttcccctaagcctcgattcaagagctatgcctacacacaggctgcttatgtcaccacctctgaccctacacggagcccatttccttcacagcatttggaagctcctgaagacaagtcatttggcagttcattgatggagagtgaagtaaacctggaccgttatcaaacagctttagaagaagtattatcgtggcttctttctgctgaggacacattgcaagcacaaggagagatttctaatgatgtggaagtggtgaaagaccagtttcatactcatgaggggtacatgatggatttgacagcccatcagggccgggttggtaatattctacaattgggaagtaagctgattggaacaggaaaattatcagaagatgaagaaactgaagtacaagagcagatgaatctcctaaattcaagatgggaatgcctcagggtagctagcatggaaaaacaaagcaatttacatagagttttaatggatctccagaatcagaaactgaaagagttgaatgactggctaacaaaaacagaagaaagaacaaggaaaatggaggaagagcctcttggacctgatcttgaagacctaaaacgccaagtacaacaacataaggtgcttcaagaagatctagaacaagaacaagtcagggtcaattctctcactcacatggtggtggtagttgatgaatctagtggagatcacgcaactgctgctttggaagaacaacttaaggtattgggagatcgatgggcaaacatctgtagatggacagaagaccgctgggttcttttacaagacatccttctcaaatggcaacgtcttactgaagaacagtgcctttttagtgcatggctttcagaaaaagaagatgcagtgaacaagattcacacaactggctttaaagatcaaaatgaaatgttatcaagtcttcaaaaactggccgttttaaaagcggatctagaaaagaaaaagcaatccatgggcaaactgtattcactcaaacaagatcttctttcaacactgaagaataagtcagtgacccagaagacggaagcatggctggataactttgcccggtgttgggataatttagtccaaaaacttgaaaagagtacagcacagatttcacaggctgtcaccaccactcagccatcactaacacagacaactgtaatggaaacagtaactacggtgaccacaagggaacagatcctggtaaagcatgctcaagaggaacttccaccaccacctccccaaaagaagaggcagattactgtggattctgaaattaggaaaaggttggatgttgatataactgaacttcacagctggattactcgctcagaagctgtgttgcagagtcctgaatttgcaatctttcggaaggaaggcaacttctcagacttaaaagaaaaagtcaatgccatagagcgagaaaaagctgagaagttcagaaaactgcaagatgccagcagatcagctcaggccctggtggaacagatggtgaatgagggtgttaatgcagatagcatcaaacaagcctcagaacaactgaacagccggtggatcgaattctgccagttgctaagtgagagacttaactggctggagtatcagaacaacatcatcgctttctataatcagctacaacaattggagcagatgacaactactgctgaaaactggttgaaaatccaacccaccaccccatcagagccaacagcaattaaaagtcagttaaaaatttgtaaggatgaagtcaaccggctatcagatcttcaacctcaaattgaacgattaaaaattcaaagcatagccctgaaagagaaaggacaaggacccatgttcctggatgcagactttgtggcctttacaaatcattttaagcaagtcttttctgatgtgcaggccagagagaaagagctacagacaatttttgacactttgccaccaatgcgctatcaggagaccatgagtgccatcaggacatgggtccagcagtcagaaaccaaactctccatacctcaacttagtgtcaccgactatgaaatcatggagcagagactcggggaattgcaggctttacaaagttctctgcaagagcaacaaagtggcctatactatctcagcaccactgtgaaagagatgtcgaagaaagcgccctctgaaattagccggaaatatcaatcagaatttgaagaaattgagggacgctggaagaagctctcctcccagctggttgagcattgtcaaaagctagaggagcaaatgaataaactccgaaaaattcagaatcacatacaaaccctgaagaaatggatggctgaagttgatgtttttctgaaggaggaatggcctgcccttggggattcagaaattctaaaaaagcagctgaaacagtgcagacttttagtcagtgatattcagacaattcagcccagtctaaacagtgtcaatgaaggtgggcagaagataaagaatgaagcagagccagagtttgcttcgagacttgagacagaactcaaagaacttaacactcagtgggatcacatgtgccaacaggtctatgccagaaaggaggccttgaagggaggtttggagaaaactgtaagcctccagaaagatctatcagagatgcacgaatggatgacacaagctgaagaagagtatcttgagagagattttgaatataaaactccagatgaattacagaaagcagttgaagagatgaagagagctaaagaagaggcccaacaaaaagaagcgaaagtgaaactccttactgagtctgtaaatagtgtcatagctcaagctccacctgtagcacaagaggccttaaaaaaggaacttgaaactctaaccaccaactaccagtggctctgcactaggctgaatgggaaatgcaagactttggaagaagtttgggcatgttggcatgagttattgtcatacttggagaaagcaaacaagtggctaaatgaagtagaatttaaacttaaaaccactgaaaacattcctggcggagctgaggaaatctctgaggtgctagattcacttgaaaatttgatgcgacattcagaggataacccaaatcagattcgcatattggcacagaccctaacagatggcggagtcatggatgagctaatcaatgaggaacttgagacatttaattctcgttggagggaactacatgaagaggctgtaaggaggcaaaagttgcttgaacagagcatccagtctgcccaggagactgaaaaatccttacacttaatccaggagtccctcacattcattgacaagcagttggcagcttatattgcagacaaggtggacgcagctcaaatgcctcaggaagcccagaaaatccaatctgatttgacaagtcatgagatcagtttagaagaaatgaagaaacataatcaggggaaggaggctgcccaaagagtcctgtctcagattgatgttgcacagaaaaaattacaagatgtctccatgaagtttcgattattccagaaaccagccaattttgagcagcgtctacaagaaagtaagatgattttagatgaagtgaagatgcacttgcctgcattggaaacaaagagtgtggaacaggaagtagtacagtcacagctaaatcattgtgtgaacttgtataaaagtctgagtgaagtgaagtctgaagtggaaatggtgataaagactggacgtcagattgtacagaaaaagcagacggaaaatcccaaagaacttgatgaaagagtaacagctttgaaattgcattataatgagctgggagcaaaggtaacagaaagaaagcaacagttggagaaatgcttgaaattgtcccgtaagatgcgaaaggaaatgaatgtcttgacagaatggctggcagctacagatatggaattgacaaagagatcagcagttgaaggaatgcctagtaatttggattctgaagttgcctggggaaaggctactcaaaaagagattgagaaacagaaggtgcacctgaagagtatcacagaggtaggagaggccttgaaaacagttttgggcaagaaggagacgttggtggaagataaactcagtcttctgaatagtaactggatagctgtcacctcccgagcagaagagtggttaaatcttttgttggaataccagaaacacatggaaacttttgaccagaatgtggaccacatcacaaagtggatcattcaggctgacacacttttggatgaatcagagaaaaagaaaccccagcaaaaagaagacgtgcttaagcgtttaaaggcagaactgaatgacatacgcccaaaggtggactctacacgtgaccaagcagcaaacttgatggcaaaccgcggtgaccactgcaggaaattagtagagccccaaatctcagagctcaaccatcgatttgcagccatttcacacagaattaagactggaaaggcctccattcctttgaaggaattggagcagtttaactcagatatacaaaaattgcttgaaccactggaggctgaaattcagcagggggtgaatctgaaagaggaagacttcaataaagatatgaatgaagacaatgagggtactgtaaaagaattgttgcaaagaggagacaacttacaacaaagaatcacagatgagagaaagcgagaggaaataaagataaaacagcagctgttacagacaaaacataatgctctcaaggatttgaggtctcaaagaagaaaaaaggctctagaaatttctcatcagtggtatcagtacaagaggcaggctgatgatctcctgaaatgcttggatgacattgaaaaaaaattagccagcctacctgagcccagagatgaaaggaaaataaaggaaattgatcgggaattgcagaagaagaaagaggagctgaatgcagtgcgtaggcaagctgagggcttgtctgaggatggggccgcaatggcagtggagccaactcagatccagctcagcaagcgctggcgggaaattgagagcaaatttgctcagtttcgaagactcaactttgcacaaattcacactgtccgtgaagaaacgatgatggtgatgactgaagacatgcctttggaaatttcttatgtgccttctacttatttgactgaaatcactcatgtctcacaagccctattagaagtggaacaacttctcaatgctcctgacctctgtgctaaggactttgaagatctctttaagcaagaggagtctctgaagaatataaaagatagtctacaacaaagctcaggtcggattgacattattcatagcaagaagacagcagcattgcaaagtgcaacgcctgtggaaagggtgaagctacaggaagctctctcccagcttgatttccaatgggaaaaagttaacaaaatgtacaaggaccgacaagggcgatttgacagatctgttgagaaatggcggcgttttcattatgatataaagatatttaatcagtggctaacagaagctgaacagtttctcagaaagacacaaattcctgagaattgggaacatgctaaatacaaatggtatcttaaggaactccaggatggcattgggcagcggcaaactgttgtcagaacattgaatgcaactggggaagaaataattcagcaatcctcaaaaacagatgccagtattctacaggaaaaattgggaagcctgaatctgcggtggcaggaggtctgcaaacagctgtcagacagaaaaaagaggctagaagaacaaaagaatatcttgtcagaatttcaaagagatttaaatgaatttgttttatggttggaggaagcagataacattgctagtatcccacttgaacctggaaaagagcagcaactaaaagaaaagcttgagcaagtcaagttactggtggaagagttgcccctgcgccagggaattctcaaacaattaaatgaaactggaggacccgtgcttgtaagtgctcccataagcccagaagagcaagataaacttgaaaataagctcaagcagacaaatctccagtggataaaggtttccagagctttacctgagaaacaaggagaaattgaagctcaaataaaagaccttgggcagcttgaaaaaaagcttgaagaccttgaagagcagttaaatcatctgctgctgtggttatctcctattaggaatcagttggaaatttataaccaaccaaaccaagaaggaccatttgacgttaaggaaactgaaatagcagttcaagctaaacaaccggatgtggaagagattttgtctaaagggcagcatttgtacaaggaaaaaccagccactcagccagtgaagaggaagttagaagatctgagctctgagtggaaggcggtaaaccgtttacttcaagagctgagggcaaagcagcctgacctagctcctggactgaccactattggagcctctcctactcagactgttactctggtgacacaacctgtggttactaaggaaactgccatctccaaactagaaatgccatcttccttgatgttggaggtacctgctctggcagatttcaaccgggcttggacagaacttaccgactggctttctctgcttgatcaagttataaaatcacagagggtgatggtgggtgaccttgaggatatcaacgagatgatcatcaagcagaaggcaacaatgcaggatttggaacagaggcgtccccagttggaagaactcattaccgctgcccaaaatttgaaaaacaagaccagcaatcaagaggctagaacaatcattacggatcgaattgaaagaattcagaatcagtgggatgaagtacaagaacaccttcagaaccggaggcaacagttgaatgaaatgttaaaggattcaacacaatggctggaagctaaggaagaagctgagcaggtcttaggacaggccagagccaagcttgagtcatggaaggagggtccctatacagtagatgcaatccaaaagaaaatcacagaaaccaagcagttggccaaagacctccgccagtggcagacaaatgtagatgtggcaaatgacttggccctgaaacttctccgggattattctgcagatgataccagaaaagtccacatgataacagagaatatcaatgcctcttggagaagcattcataaaagggtgagtgagcgagaggctgctttggaagaaactcatagattactgcaacagttccccctggacctggaaaagtttcttgcctggcttacagaagctgaaacaactgccaatgtcctacaggatgctacccgtaaggaaaggctcctagaagactccaagggagtaaaagagctgatgaaacaatggcaagacctccaaggtgaaattgaagctcacacagatgtttatcacaacctggatgaaaacagccaaaaaatcctgagatccctggaaggttccgatgatgcagtcctgttacaaagacgtttggataacatgaacttcaagtggagtgaacttcggaaaaagtctctcaacattaggtcccatttggaagccagttctgaccagtggaagcgtctgcacctttctctgcaggaacttctggtgtggctacagctgaaagatgatgaattaagccggcaggcacctattggaggcgactttccagcagttcagaagcagaacgatgtacatagggccttcaagagggaattgaaaactaaagaacctgtaatcatgagtactcttgagactgtacgaatatttctgacagagcagcctttggaaggactagagaaactctaccaggagcccagagagctgcctcctgaggagagagcccagaatgtcactcggcttctacgaaagcaggctgaggaggtcaatactgagtgggaaaaattgaacctgcactccgctgactggcagagaaaaatagatgagacccttgaaagactccgggaacttcaagaggccacggatgagctggacctcaagctgcgccaagctgaggtgatcaagggatcctggcagcccgtgggcgatctcctcattgactctctccaagatcacctcgagaaagtcaaggcacttcgaggagaaattgcgcctctgaaagagaacgtgagccacgtcaatgaccttgctcgccagcttaccactttgggcattcagctctcaccgtataacctcagcactctggaagacctgaacaccagatggaagcttctgcaggtggccgtcgaggaccgagtcaggcagctgcatgaagcccacagggactttggtccagcatctcagcactttctttccacgtctgtccagggtccctgggagagagccatctcgccaaacaaagtgccctactatatcaaccacgagactcaaacaacttgctgggaccatcccaaaatgacagagctctaccagtctttagctgacctgaataatgtcagattctcagcttataggactgccatgaaactccgaagactgcagaaggccctttgcttggatctcttgagcctgtcagctgcatgtgatgccttggaccagcacaacctcaagcaaaatgaccagcccatggatatcctgcagattattaattgtttgaccactatttatgaccgcctggagcaagagcacaacaatttggtcaacgtccctctctgcgtggatatgtgtctgaactggctgctgaatgtttatgatacgggacgaacagggaggatccgtgtcctgtcttttaaaactggcatcatttccctgtgtaaagcacatttggaagacaagtacagataccttttcaagcaagtggcaagttcaacaggattttgtgaccagcgcaggctgggcctccttctgcatgattctatccaaattccaagacagttgggtgaagttgcatcctttgggggcagtaacattgagccaagtgtccggagctgcttccaatttgctaataataagccagagatcgaagcggccctcttcctagactggatgagactggaaccccagtccatggtgtggctgcccgtcctgcacagagtggctgctgcagaaactgccaagcatcaggccaaatgtaacatctgcaaagagtgtccaatcattggattcaggtacaggagtctaaagcactttaattatgacatctgccaaagctgctttttttctggtcgagttgcaaaaggccataaaatgcactatcccatggtggaatattgcactccgactacatcaggagaagatgttcgagactttgccaaggtactaaaaaacaaatttcgaaccaaaaggtattttgcgaagcatccccgaatgggctacctgccagtgcagactgtcttagagggggacaacatggaaacgcctgcctcgtcccctcagctttcacacgatgatactcattcacgcattgaacattatgctagcaggctagcagaaatggaaaacagcaatggatcttatctaaatgatagcatctctcctaatgagagcatagatgatgaacatttgttaatccagcattactgccaaagtttgaaccaggactcccccctgagccagcctcgtagtcctgcccagatcttgatttccttagagagtgaggaaagaggggagctagagagaatcctagcagatcttgaggaagaaaacaggaatctgcaagcagaatatgaccgtctaaagcagcagcacgaacataaaggcctgtccccactgccgtcccctcctgaaatgatgcccacctctccccagagtccccgggatgctgagctcattgctgaggccaagctactgcgtcaacacaaaggccgcctggaagccaggatgcaaatcctggaagaccacaataaacagctggagtcacagttacacaggctaaggcagctgctggagcaaccccaggcagaggccaaagtgaatggcacaacggtgtcctctccttctacctctctacagaggtccgacagcagtcagcctatgctgctccgagtggttggcagtcaaacttcggactccatgggtgaggaagatcttctcagtcctccccaggacacaagcacagggttagaggaggtgatggagcaactcaacaactccttccctagttcaagaggacacaatgtaggaagtcttttccacatggcagatgatttgggcagagcgatggagtccttagtatcagtcatgacagatgaagaaggagcagaataaatgttttacaactcctgattcccgcatggtttttataatattcatacaacaaagaggattagacagtaagagtttacaagaaataaatctatatttttgtgaagggtagtggtattatactgtagatttcagtagtttctaagtctgttattgttttgttaacaatggcaggttttacacgtctatgcaattgtacaaaaaagttataagaaaactacatgtaaaatcttgatagctaaataacttgccatttctttatatggaacgcattttgggttgtttaaaaatttataacagttataaagaaagattgtaaactaaagtgtgctttataaaaaaaagttgtttataaaaacccctaaaaacaaaacaaacacacacacacacacatacacacacacacacaaaactttgaggcagcgcattgttttgcatccttttggcgtgatatccatatgaaattcatggctttttctttttttgcatattaaagataagacttcctctaccaccacaccaaatgactactacacactgctcatttgagaactgtcagctgagtggggcaggcttgagttttcatttcatatatctatatgtctataagtatataaatactatagttatatagataaagagatacgaatttctatagactgactttttccattttttaaatgttcatgtcacatcctaatagaaagaaattacttctagtcagtcatccaggcttacctgcttggtctagaatggatttttcccggagccggaagccaggaggaaactacaccacactaaaacattgtctacagctccagatgtttctcattttaaacaactttccactgacaacgaaagtaaagtaaagtattggatttttttaaagggaacatgtgaatgaatacacaggacttattatatcagagtgagtaatcggttggttggttgattgattgattgattgatacattcagcttcctgctgctagcaatgccacgatttagatttaatgatgcttcagtggaaatcaatcagaaggtattctgaccttgtgaacatcagaaggtattttttaactcccaagcagtagcaggacgatgatagggctggagggctatggattcccagcccatccctgtgaaggagtaggccactctttaagtgaaggattggatgattgttcataatacataaagttctctgtaattacaactaaattattatgccctcttctcacagtcaaaaggaactgggtggtttggtttttgttgcttttttagatttattgtcccatgtgggatgagtttttaaatgccacaagacataatttaaaataaataaactttgggaaaaggtgtaaaacagtagccccatcacatttgtgatactgacaggtatcaacccagaagcccatgaactgtgtttccatcctttgcatttctctgcgagtagttccacacaggtttgtaagtaagtaagaaagaaggcaaattgattcaaatgttacaaaaaaacccttcttggtggattagacaggttaaatatataaacaaacaaacaaaaattgctcaaaaaagaggagaaaagctcaagaggaaaagctaaggactggtaggaaaaagctttactctttcatgccattttatttctttttgatttttaaatcattcattcaatagataccaccgtgtgacctataattttgcaaatctgttacctctgacatcaagtgtaattagcttttggagagtgggctgacatcaagtgtaattagcttttggagagtgggttttgtccattattaataattaattaattaacatcaaacacggcttctcatgctatttctacctcactttggttttggggtgttcctgataattgtgcacacctgagttcacagcttcaccacttgtccattgcgttattttctttttcctttataattctttctttttccttcataattttcaaaagaaaacccaaagctctaaggtaacaaattaccaaattacatgaagatttggtttttgtcttgcatttttttcctttatgtgacgctggaccttttctttacccaaggatttttaaaactcagatttaaaacaaggggttactttacatcctactaagaagtttaagtaagtaagtttcattctaaaatcagaggtaaatagagtgcataaataattttgttttaatctttttgtttttcttttagacacattagctctggagtgagtctgtcataatatttgaacaaaaattgagagctttattgctgcattttaagcataattaatttggacattatttcgtgttgtgttctttataaccaccaagtattaaactgtaaatcataatgtaactgaagcataaacatcacatggcatgttttgtcattgttttcaggtactgagttcttacttgagtatcataatatattgtgttttaacaccaacactgtaacatttacgaattatttttttaaacttcagttttactgcattttcacaacatatcagacttcaccaaatatatgccttactattgtattatagtactgctttactgtgtatctcaataaagcacgcagttatgttac

SEQ ID NO: 63 - protein, 3690 aa, Homo sapiens
MLWWEEVEDCYEREDVQKKTFTKWVNAQFSKFGKQHIENLFSDLQDGRRLLDLLEGLTGQKLPKEKGSTRVHALNNVNKALRVLQNNNVDLVNIGSTDIVDGNHKLTLGLIWNIILHWQVKNVMKNIMAGLQQTNSEKILLSWVRQSTRNYPQVNVINFTTSWSDGLALNALIHSHRPDLFDWNSVVCQQSATQRLEHAFNIARYQLGIEKLLDPEDVDTTYPDKKSILMYITSLFQVLPQQVSIEAIQEVEMLPRPPKVTKEEHFQLHHQMHYSQQITVSLAQGYERTSSPKPRFKSYAYTQAAYVTTSDPTRSPFPSQHLEAPEDKSFGSSLMESEVNLDRYQTALEEVLSWLLSAEDTLQAQGEISNDVEVVKDQFHTHEGYMMDLTAHQGRVGNILQLGSKLIGTGKLSEDEETEVQEQMNLLNSRWECLRVASMEKQSNLHRVLMDLQNQKLKELNDWLTKTEERTRKMEEEPLGPDLEDLKRQVQQHKVLQEDLEQEQVRVNSLTHMVVVVDESSGDHATAALEEQLKVLGDRWANICRWTEDRWVLLQDILLKWQRLTEEQCLFSAWLSEKEDAVNKIHTTGFKDQNEMLSSLQKLAVLKADLEKKKQSMGKLYSLKQDLLSTLKNKSVTQKTEAWLDNFARCWDNLVQKLEKSTAQISQAVTTTQPSLTQTTVMETVTTVTTREQILVKHAQEELPPPPPQKKRQITVDSEIRKRLDVDITELHSWITRSEAVLQSPEFAIFRKEGNFSDLKEKVNAIEREKAEKFRKLQDASRSAQALVEQMVNEGVNADSIKQASEQLNSRWIEFCQLLSERLNWLEYQNNIIAFYNQLQQLEQMTTTAENWLKIQPTTPSEPTAIKSQLKICKDEVNRLSDLQPQIERLKIQSIALKEKGQGPMFLDADFVAFTNHFKQVFSDVQAREKELQTIFDTLPPMRYQETMSAIRTWVQQSETKLSIPQLSVTDYEIMEQRLGELQALQSSLQEQQSGLYYLSTTVKEMSKKAPSEISRKYQSEFEEIEGRWKKLSSQLVEHCQKLEEQMNKLRKIQNHIQTLKKWMAEVDVFLKEEWPALGDSEILKKQLKQCRLLVSDIQTIQPSLNSVNEGGQKIKNEAEPEFASRLETELKELNTQWDHMCQQVYARKEALKGGLEKTVSLQKDLSEMHEWMTQAEEEYLERDFEYKTPDELQKAVEEMKRAKEEAQQKEAKVKLLTESVNSVIAQAPPVAQEALKKELETLTTNYQWLCTRLNGKCKTLEEVWACWHELLSYLEKANKWLNEVEFKLKTTENIPGGAEEISEVLDSLENLMRHSEDNPNQIRILAQTLTDGGVMDELINEELETFNSRWRELHEEAVRRQKLLEQSIQSAQETEKSLHLIQESLTFIDKQLAAYIADKVDAAQMPQEAQKIQSDLTSHEISLEEMKKHNQGKEAAQRVLSQIDVAQKKLQDVSMKFRLFQKPANFEQRLQESKMILDEVKMHLPALETKSVEQEVVQSQLNHCVNLYKSLSEVKSEVEMVIKTGRQIVQKKQTENPKELDERVTALKLHYNELGAKVTERKQQLEKCLKLSRKMRKEMNVLTEWLAATDMELTKRSAVEGMPSNLDSEVAWGKATQKEIEKQKVHLKSITEVGEALKTVLGKKETLVEDKLSLLNSNWIAVTSRAEEWLNLLLEYQKHMETFDQNVDHITKWIIQADTLLDESEKKKPQQKEDVLKRLKAELNDIRPKVDSTRDQAANLMANRGDHCRKLVEPQISELNHRFAAISHRIKTGKASIPLKELEQFNSDIQKLLEPLEAEIQQGVNLKEEDFNKDMNEDNEGTVKELLQRGDNLQQRITDERKREEIKIKQQLLQTKHNALKDLRSQRRKKALEISHQWYQYKRQADDLLKCLDDIEKKLASLPEPRDERKIKEIDRELQKKKEELNAVRRQAEGLSEDGAAMAVEPTQIQLSKRWREIESKFAQFRRLNFAQIHTVREETMMVMTEDMPLEISYVPSTYLTEITHVSQALLEVEQLLNAPDLCAKDFEDLFKQEESLKNIKDSLQQSSGRIDIIHSKKTAALQSATPVERVKLQEALSQLDFQWEKVNKMYKDRQGRFDRSVEKWRRFHYDIKIFNQWLTEAEQFLRKTQIPENWEHAKYKWYLKELQDGIGQRQTVVRTLNATGEEIIQQSSKTDASILQEKLGSLNLRWQEVCKQLSDRKKRLEEQKNILSEFQRDLNEFVLWLEEADNIASIPLEPGKEQQLKEKLEQVKLLVEELPLRQGILKQLNETGGPVLVSAPISPEEQDKLENKLKQTNLQWIKVSRALPEKQGEIEAQIKDLGQLEKKLEDLEEQLNHLLLWLSPIRNQLEIYNQPNQEGPFDVKETEIAVQAKQPDVEEILSKGQHLYKEKPATQPVKRKLEDLSSEWKAVNRLLQELRAKQPDLAPGLTTIGASPTQTVTLVTQPVVTKETAISKLEMPSSLMLEVPALADFNRAWTELTDWLSLLDQVIKSQRVMVGDLEDINEMIIKQKATMQDLEQRRPQLEELITAAQNLKNKTSNQEARTIITDRIERIQNQWDEVQEHLQNRRQQLNEMLKDSTQWLEAKEEAEQVLGQARAKLESWKEGPYTVDAIQKKITETKQLAKDLRQWQTNVDVANDLALKLLRDYSADDTRKVHMITENINASWRSIHKRVSEREAALEETHRLLQQFPLDLEKFLAWLTEAETTANVLQDATRKERLLEDSKGVKELMKQWQDLQGEIEAHTDVYHNLDENSQKILRSLEGSDDAVLLQRRLDNMNFKWSELRKKSLNIRSHLEASSDQWKRLHLSLQELLVWLQLKDDELSRQAPIGGDFPAVQKQNDVHRAFKRELKTKEPVIMSTLETVRIFLTEQPLEGLEKLYQEPRELPPEERAQNVTRLLRKQAEEVNTEWEKLNLHSADWQRKIDETLERLRELQEATDELDLKLRQAEVIKGSWQPVGDLLIDSLQDHLEKVKALRGEIAPLKENVSHVNDLARQLTTLGIQLSPYNLSTLEDLNTRWKLLQVAVEDRVRQLHEAHRDFGPASQHFLSTSVQGPWERAISPNKVPYYINHETQTTCWDHPKMTELYQSLADLNNVRFSAYRTAMKLRRLQKALCLDLLSLSAACDALDQHNLKQNDQPMDILQIINCLTTIYDRLEQEHNNLVNVPLCVDMCLNWLLNVYDTGRTGRIRVLSFKTGIISLCKAHLEDKYRYLFKQVASSTGFCDQRRLGLLLHDSIQIPRQLGEVASFGGSNIEPSVRSCFQFANNKPEIEAALFLDWMRLEPQSMVWLPVLHRVAAAETAKHQAKCNICKECPIIGFRYRSLKHFNYDICQSCFFSGRVAKGHKMHYPMVEYCTPTTSGEDVRDFAKVLKNKFRTKRYFAKHPRMGYLPVQTVLEGDNMETPASSPQLSHDDTHSRIEHYASRLAEMENSNGSYLNDSISPNESIDDEHLLIQHYCQSLNQDSPLSQPRSPAQILISLESEERGELERILADLEEENRNLQAEYDRLKQQHEHKGLSPLPSPPEMMPTSPQSPRDAELIAEAKLLRQHKGRLEARMQILEDHNKQLESQLHRLRQLLEQPQAEAKVNGTTVSSPSTSLQRSDSSQPMLLRVVGSQTSDSMGEEDLLSPPQDTSTGLEEVMEQLNNSFPSSRGHNVGSLFHMADDLGRAMESLVSVMTDEEGAE

SEQ ID NO: 64 - DNA, 13055 bp, Homo sapiens
actttccccctacaggactcagatctgggaggcaattaccttcggagaaaaacgaataggaaaaactgaagtgttactttttttaaagctgctgaagtttgttggtttctcattgtttttaagcctactggagcaataaagtttgaagaacttttaccaggttttttttatcgctgccttgatatacacttttcaaaatgctttggtgggaagaagtagaggactgttatgaaagagaagatgttcaaaagaaaacattcacaaaatgggtaaatgcacaattttctaagtttgggaagcagcatattgagaacctcttcagtgacctacaggatgggaggcgcctcctagacctcctcgaaggcctgacagggcaaaaactgccaaaagaaaaaggatccacaagagttcatgccctgaacaatgtcaacaaggcactgcgggttttgcagaacaataatgttgatttagtgaatattggaagtactgacatcgtagatggaaatcataaactgactcttggtttgatttggaatataatcctccactggcaggtcaaaaatgtaatgaaaaatatcatggctggattgcaacaaaccaacagtgaaaagattctcctgagctgggtccgacaatcaactcgtaattatccacaggttaatgtaatcaacttcaccaccagctggtctgatggcctggctttgaatgctctcatccatagtcataggccagacctatttgactggaatagtgtggtttgccagcagtcagccacacaacgactggaacatgcattcaacatcgccagatatcaattaggcatagagaaactactcgatcctgaagatgttgataccacctatccagataagaagtccatcttaatgtacatcacatcactcttccaagttttgcctcaacaagtgagcattgaagccatccaggaagtggaaatgttgccaaggccacctaaagtgactaaagaagaacattttcagttacatcatcaaatgcactattctcaacagatcacggtcagtctagcacagggatatgagagaacttcttcccctaagcctcgattcaagagctatgcctacacacaggctgcttatgtcaccacctctgaccctacacggagcccatttccttcacagcatttggaagctcctgaagacaagtcatttggcagttcattgatggagagtgaagtaaacctggaccgttatcaaacagctttagaagaagtattatcgtggcttctttctgctgaggacacattgcaagcacaaggagagatttctaatgatgtggaagtggtgaaagaccagtttcatactcatgaggggtacatgatggatttgacagcccatcagggccgggttggtaatattctacaattgggaagtaagctgattggaacaggaaaattatcagaagatgaagaaactgaagtacaagagcagatgaatctcctaaattcaagatgggaatgcctcagggtagctagcatggaaaaacaaagcaatttacatagagttttaatggatctccagaatcagaaactgaaagagttgaatgactggctaacaaaaacagaagaaagaacaaggaaaatggaggaagagcctcttggacctgatcttgaagacctaaaacgccaagtacaacaacataaggtgcttcaagaagatctagaacaagaacaagtcagggtcaattctctcactcacatggtggtggtagttgatgaatctagtggagatcacgcaactgctgctttggaagaacaacttaaggtattgggagatcgatgggcaaacatctgtagatggacagaagaccgctgggttcttttacaagacatccttctcaaatggcaacgtcttactgaagaacagtgcctttttagtgcatggctttcagaaaaagaagatgcagtgaacaagattcacacaactggctttaaagatcaaaatgaaatgttatcaagtcttcaaaaactggccgttttaaaagcggatctagaaaagaaaaagcaatccatgggcaaactgtattcactcaaacaagatcttctttcaacactgaagaataagtcagtgacccagaagacggaagcatggctggataactttgcccggtgttgggataatttagtccaaaaacttgaaaagagtacagcacagatttcacaggctgtcaccaccactcagccatcactaacacagacaactgtaatggaaacagtaactacggtgaccacaagggaacagatcctggtaaagcatgctcaagaggaacttccaccaccacctccccaaaagaagaggcagattactgtggattctgaaattaggaaaaggttggatgttgatataactgaacttcacagctggattactcgctcagaagctgtgttgcagagtcctgaatttgcaatctttcggaaggaaggcaacttctcagacttaaaagaaaaagtcaatgccatagagcgagaaaaagctgagaagttcagaaaactgcaagatgccagcagatcagctcaggccctggtggaacagatggtgaatgagggtgttaatgcagatagcatcaaacaagcctcagaacaactgaacagccggtggatcgaattctgccagttgctaagtgagagacttaactggctggagtatcagaacaacatcatcgctttctataatcagctacaacaattggagcagatgacaactactgctgaaaactggttgaaaatccaacccaccaccccatcagagccaacagcaattaaaagtcagttaaaaatttgtaaggatgaagtcaaccggctatcagatcttcaacctcaaattgaacgattaaaaattcaaagcatagccctgaaagagaaaggacaaggacccatgttcctggatgcagactttgtggcctttacaaatcattttaagcaagtcttttctgatgtgcaggccagagagaaagagctacagacaatttttgacactttgccaccaatgcgctatcaggagaccatgagtgccatcaggacatgggtccagcagtcagaaaccaaactctccatacctcaacttagtgtcaccgactatgaaatcatggagcagagactcggggaattgcaggctttacaaagttctctgcaagagcaacaaagtggcctatactatctcagcaccactgtgaaagagatgtcgaagaaagcgccctctgaaattagccggaaatatcaatcagaatttgaagaaattgagggacgctggaagaagctctcctcccagctggttgagcattgtcaaaagctagaggagcaaatgaataaactccgaaaaattcagaatcacatacaaaccctgaagaaatggatggctgaagttgatgtttttctgaaggaggaatggcctgcccttggggattcagaaattctaaaaaagcagctgaaacagtgcagacttttagtcagtgatattcagacaattcagcccagtctaaacagtgtcaatgaaggtgggcagaagataaagaatgaagcagagccagagtttgcttcgagacttgagacagaactcaaagaacttaacactcagtgggatcacatgtgccaacaggtctatgccagaaaggaggccttgaagggaggtttggagaaaactgtaagcctccagaaagatctatcagagatgcacgaatggatgacacaagctgaagaagagtatcttgagagagattttgaatataaaactccagatgaattacagaaagcagttgaagagatgaagagagctaaagaagaggcccaacaaaaagaagcgaaagtgaaactccttactgagtctgtaaatagtgtcatagctcaagctccacctgtagcacaagaggccttaaaaaaggaacttgaaactctaaccaccaactaccagtggctctgcactaggctgaatgggaaatgcaagactttggaagaagtttgggcatgttggcatgagttattgtcatacttggagaaagcaaacaagtggctaaatgaagtagaatttaaacttaaaaccactgaaaacattcctggcggagctgaggaaatctctgaggtgctagattcacttgaaaatttgatgcgacattcagaggataacccaaatcagattcgcatattggcacagaccctaacagatggcggagtcatggatgagctaatcaatgaggaacttgagacatttaattctcgttggagggaactacatgaagaggctgtaaggaggcaaaagttgcttgaacagagcatccagtctgcccaggagactgaaaaatccttacacttaatccaggagtccctcacattcattgacaagcagttggcagcttatattgcagacaaggtggacgcagctcaaatgcctcaggaagcccagaaaatccaatctgatttgacaagtcatgagatcagtttagaagaaatgaagaaacataatcaggggaaggaggctgcccaaagagtcctgtctcagattgatgttgcacagaaaaaattacaagatgtctccatgaagtttcgattattccagaaaccagccaattttgagcagcgtctacaagaaagtaagatgattttagatgaagtgaagatgcacttgcctgcattggaaacaaagagtgtggaacaggaagtagtacagtcacagctaaatcattgtgtgaacttgtataaaagtctgagtgaagtgaagtctgaagtggaaatggtgataaagactggacgtcagattgtacagaaaaagcagacggaaaatcccaaagaacttgatgaaagagtaacagctttgaaattgcattataatgagctgggagcaaaggtaacagaaagaaagcaacagttggagaaatgcttgaaattgtcccgtaagatgcgaaaggaaatgaatgtcttgacagaatggctggcagctacagatatggaattgacaaagagatcagcagttgaaggaatgcctagtaatttggattctgaagttgcctggggaaaggctactcaaaaagagattgagaaacagaaggtgcacctgaagagtatcacagaggtaggagaggccttgaaaacagttttgggcaagaaggagacgttggtggaagataaactcagtcttctgaatagtaactggatagctgtcacctcccgagcagaagagtggttaaatcttttgttggaataccagaaacacatggaaacttttgaccagaatgtggaccacatcacaaagtggatcattcaggctgacacacttttggatgaatcagagaaaaagaaaccccagcaaaaagaagacgtgcttaagcgtttaaaggcagaactgaatgacatacgcccaaaggtggactctacacgtgaccaagcagcaaacttgatggcaaaccgcggtgaccactgcaggaaattagtagagccccaaatctcagagctcaaccatcgatttgcagccatttcacacagaattaagactggaaaggcctccattcctttgaaggaattggagcagtttaactcagatatacaaaaattgcttgaaccactggaggctgaaattcagcagggggtgaatctgaaagaggaagacttcaataaagatatgaatgaagacaatgagggtactgtaaaagaattgttgcaaagaggagacaacttacaacaaagaatcacagatgagagaaagcgagaggaaataaagataaaacagcagctgttacagacaaaacataatgctctcaaggatttgaggtctcaaagaagaaaaaaggctctagaaatttctcatcagtggtatcagtacaagaggcaggctgatgatctcctgaaatgcttggatgacattgaaaaaaaattagccagcctacctgagcccagagatgaaaggaaaataaaggaaattgatcgggaattgcagaagaagaaagaggagctgaatgcagtgcgtaggcaagctgagggcttgtctgaggatggggccgcaatggcagtggagccaactcagatccagctcagcaagcgctggcgggaaattgagagcaaatttgctcagtttcgaagactcaactttgcacaaattcacactgtccgtgaagaaacgatgatggtgatgactgaagacatgcctttggaaatttcttatgtgccttctacttatttgactgaaatcactcatgtctcacaagccctattagaagtggaacaacttctcaatgctcctgacctctgtgctaaggactttgaagatctctttaagcaagaggagtctctgaagaatataaaagatagtctacaacaaagctcaggtcggattgacattattcatagcaagaagacagcagcattgcaaagtgcaacgcctgtggaaagggtgaagctacaggaagctctctcccagcttgatttccaatgggaaaaagttaacaaaatgtacaaggaccgacaagggcgatttgacagatctgttgagaaatggcggcgttttcattatgatataaagatatttaatcagtggctaacagaagctgaacagtttctcagaaagacacaaattcctgagaattgggaacatgctaaatacaaatggtatcttaaggaactccaggatggcattgggcagcggcaaactgttgtcagaacattgaatgcaactggggaagaaataattcagcaatcctcaaaaacagatgccagtattctacaggaaaaattgggaagcctgaatctgcggtggcaggaggtctgcaaacagctgtcagacagaaaaaagaggctagaagaacaaaagaatatcttgtcagaatttcaaagagatttaaatgaatttgttttatggttggaggaagcagataacattgctagtatcccacttgaacctggaaaagagcagcaactaaaagaaaagcttgagcaagtcaagttactggtggaagagttgcccctgcgccagggaattctcaaacaattaaatgaaactggaggacccgtgcttgtaagtgctcccataagcccagaagagcaagataaacttgaaaataagctcaagcagacaaatctccagtggataaaggtttccagagctttacctgagaaacaaggagaaattgaagctcaaataaaagaccttgggcagcttgaaaaaaagcttgaagaccttgaagagcagttaaatcatctgctgctgtggttatctcctattaggaatcagttggaaatttataaccaaccaaaccaagaaggaccatttgacgttaaggaaactgaaatagcagttcaagctaaacaaccggatgtggaagagattttgtctaaagggcagcatttgtacaaggaaaaaccagccactcagccagtgaagaggaagttagaagatctgagctctgagtggaaggcggtaaaccgtttacttcaagagctgagggcaaagcagcctgacctagctcctggactgaccactattggagcctctcctactcagactgttactctggtgacacaacctgtggttactaaggaaactgccatctccaaactagaaatgccatcttccttgatgttggaggtacctgctctggcagatttcaaccgggcttggacagaacttaccgactggctttctctgcttgatcaagttataaaatcacagagggtgatggtgggtgaccttgaggatatcaacgagatgatcatcaagcagaaggcaacaatgcaggatttggaacagaggcgtccccagttggaagaactcattaccgctgcccaaaatttgaaaaacaagaccagcaatcaagaggctagaacaatcattacggatcgaattgaaagaattcagaatcagtgggatgaagtacaagaacaccttcagaaccggaggcaacagttgaatgaaatgttaaaggattcaacacaatggctggaagctaaggaagaagctgagcaggtcttaggacaggccagagccaagcttgagtcatggaaggagggtccctatacagtagatgcaatccaaaagaaaatcacagaaaccaagcagttggccaaagacctccgccagtggcagacaaatgtagatgtggcaaatgacttggccctgaaacttctccgggattattctgcagatgataccagaaaagtccacatgataacagagaatatcaatgcctcttggagaagcattcataaaagggtgagtgagcgagaggctgctttggaagaaactcatagattactgcaacagttccccctggacctggaaaagtttcttgcctggcttacagaagctgaaacaactgccaatgtcctacaggatgctacccgtaaggaaaggctcctagaagactccaagggagtaaaagagctgatgaaacaatggcaagacctccaaggtgaaattgaagctcacacagatgtttatcacaacctggatgaaaacagccaaaaaatcctgagatccctggaaggttccgatgatgcagtcctgttacaaagacgtttggataacatgaacttcaagtggagtgaacttcggaaaaagtctctcaacattaggtcccatttggaagccagttctgaccagtggaagcgtctgcacctttctctgcaggaacttctggtgtggctacagctgaaagatgatgaattaagccggcaggcacctattggaggcgactttccagcagttcagaagcagaacgatgtacatagggccttcaagagggaattgaaaactaaagaacctgtaatcatgagtactcttgagactgtacgaatatttctgacagagcagcctttggaaggactagagaaactctaccaggagcccagagagctgcctcctgaggagagagcccagaatgtcactcggcttctacgaaagcaggctgaggaggtcaatactgagtgggaaaaattgaacctgcactccgctgactggcagagaaaaatagatgagacccttgaaagactccgggaacttcaagaggccacggatgagctggacctcaagctgcgccaagctgaggtgatcaagggatcctggcagcccgtgggcgatctcctcattgactctctccaagatcacctcgagaaagtcaaggcacttcgaggagaaattgcgcctctgaaagagaacgtgagccacgtcaatgaccttgctcgccagcttaccactttgggcattcagctctcaccgtataacctcagcactctggaagacctgaacaccagatggaagcttctgcaggtggccgtcgaggaccgagtcaggcagctgcatgaagcccacagggactttggtccagcatctcagcactttctttccacgtctgtccagggtccctgggagagagccatctcgccaaacaaagtgccctactatatcaaccacgagactcaaacaacttgctgggaccatcccaaaatgacagagctctaccagtctttagctgacctgaataatgtcagattctcagcttataggactgccatgaaactccgaagactgcagaaggccctttgcttggatctcttgagcctgtcagctgcatgtgatgccttggaccagcacaacctcaagcaaaatgaccagcccatggatatcctgcagattattaattgtttgaccactatttatgaccgcctggagcaagagcacaacaatttggtcaacgtccctctctgcgtggatatgtgtctgaactggctgctgaatgtttatgatacgggacgaacagggaggatccgtgtcctgtcttttaaaactggcatcatttccctgtgtaaagcacatttggaagacaagtacagataccttttcaagcaagtggcaagttcaacaggattttgtgaccagcgcaggctgggcctccttctgcatgattctatccaaattccaagacagttgggtgaagttgcatcctttgggggcagtaacattgagccaagtgtccggagctgcttccaatttgctaataataagccagagatcgaagcggccctcttcctagactggatgagactggaaccccagtccatggtgtggctgcccgtcctgcacagagtggctgctgcagaaactgccaagcatcaggccaaatgtaacatctgcaaagagtgtccaatcattggattcaggtacaggagtctaaagcactttaattatgacatctgccaaagctgctttttttctggtcgagttgcaaaaggccataaaatgcactatcccatggtggaatattgcactccgactacatcaggagaagatgttcgagactttgccaaggtactaaaaaacaaatttcgaaccaaaaggtattttgcgaagcatccccgaatgggctacctgccagtgcagactgtcttagagggggacaacatggaaacgaatctgcaagcagaatatgaccgtctaaagcagcagcacgaacataaaggcctgtccccactgccgtcccctcctgaaatgatgcccacctctccccagagtccccgggatgctgagctcattgctgaggccaagctactgcgtcaacacaaaggccgcctggaagccaggatgcaaatcctggaagaccacaataaacagctggagtcacagttacacaggctaaggcagctgctggagcaaccccaggcagaggccaaagtgaatggcacaacggtgtcctctccttctacctctctacagaggtccgacagcagtcagcctatgctgctccgagtggttggcagtcaaacttcggactccatgggtgaggaagatcttctcagtcctccccaggacacaagcacagggttagaggaggtgatggagcaactcaacaactccttccctagttcaagaggacacaatgtaggaagtcttttccacatggcagatgatttgggcagagcgatggagtccttagtatcagtcatgacagatgaagaaggagcagaataaatgttttacaactcctgattcccgcatggtttttataatattcatacaacaaagaggattagacagtaagagtttacaagaaataaatctatatttttgtgaagggtagtggtattatactgtagatttcagtagtttctaagtctgttattgttttgttaacaatggcaggttttacacgtctatgcaattgtacaaaaaagttataagaaaactacatgtaaaatcttgatagctaaataacttgccatttctttatatggaacgcattttgggttgtttaaaaatttataacagttataaagaaagattgtaaactaaagtgtgctttataaaaaaaagttgtttataaaaacccctaaaaacaaaacaaacacacacacacacacatacacacacacacacaaaactttgaggcagcgcattgttttgcatccttttggcgtgatatccatatgaaattcatggctttttctttttttgcatattaaagataagacttcctctaccaccacaccaaatgactactacacactgctcatttgagaactgtcagctgagtggggcaggcttgagttttcatttcatatatctatatgtctataagtatataaatactatagttatatagataaagagatacgaatttctatagactgactttttccattttttaaatgttcatgtcacatcctaatagaaagaaattacttctagtcagtcatccaggcttacctgcttggtctagaatggatttttcccggagccggaagccaggaggaaactacaccacactaaaacattgtctacagctccagatgtttctcattttaaacaactttccactgacaacgaaagtaaagtaaagtattggatttttttaaagggaacatgtgaatgaatacacaggacttattatatcagagtgagtaatcggttggttggttgattgattgattgattgatacattcagcttcctgctgctagcaatgccacgatttagatttaatgatgcttcagtggaaatcaatcagaaggtattctgaccttgtgaacatcagaaggtattttttaactcccaagcagtagcaggacgatgatagggctggagggctatggattcccagcccatccctgtgaaggagtaggccactctttaagtgaaggattggatgattgttcataatacataaagttctctgtaattacaactaaattattatgccctcttctcacagtcaaaaggaactgggtggtttggtttttgttgcttttttagatttattgtcccatgtgggatgagtttttaaatgccacaagacataatttaaaataaataaactttgggaaaaggtgtaaaacagtagccccatcacatttgtgatactgacaggtatcaacccagaagcccatgaactgtgtttccatcctttgcatttctctgcgagtagttccacacaggtttgtaagtaagtaagaaagaaggcaaattgattcaaatgttacaaaaaaacccttcttggtggattagacaggttaaatatataaacaaacaaacaaaaattgctcaaaaaagaggagaaaagctcaagaggaaaagctaaggactggtaggaaaaagctttactctttcatgccattttatttctttttgatttttaaatcattcattcaatagataccaccgtgtgacctataattttgcaaatctgttacctctgacatcaagtgtaattagcttttggagagtgggctgacatcaagtgtaattagcttttggagagtgggttttgtccattattaataattaattaattaacatcaaacacggcttctcatgctatttctacctcactttggttttggggtgttcctgataattgtgcacacctgagttcacagcttcaccacttgtccattgcgttattttctttttcctttataattctttctttttccttcataattttcaaaagaaaacccaaagctctaaggtaacaaattaccaaattacatgaagatttggtttttgtcttgcatttttttcctttatgtgacgctggaccttttcttta

SEQ ID NO: 65 - protein, 3593 aa, Homo sapiens
MLWWEEVEDCYEREDVQKKTFTKWVNAQFSKFGKQHIENLFSDLQDGRRLLDLLEGLTGQKLPKEKGSTRVHALNNVNKALRVLQNNNVDLVNIGSTDIVDGNHKLTLGLIWNIILHWQVKNVMKNIMAGLQQTNSEKILLSWVRQSTRNYPQVNVINFTTSWSDGLALNALIHSHRPDLFDWNSVVCQQSATQRLEHAFNIARYQLGIEKLLDPEDVDTTYPDKKSILMYITSLFQVLPQQVSIEAIQEVEMLPRPPKVTKEEHFQLHHQMHYSQQITVSLAQGYERTSSPKPRFKSYAYTQAAYVTTSDPTRSPFPSQHLEAPEDKSFGSSLMESEVNLDRYQTALEEVLSWLLSAEDTLQAQGEISNDVEVVKDQFHTHEGYMMDLTAHQGRVGNILQLGSKLIGTGKLSEDEETEVQEQMNLLNSRWECLRVASMEKQSNLHRVLMDLQNQKLKELNDWLTKTEERTRKMEEEPLGPDLEDLKRQVQQHKVLQEDLEQEQVRVNSLTHMVVVVDESSGDHATAALEEQLKVLGDRWANICRWTEDRWVLLQDILLKWQRLTEEQCLFSAWLSEKEDAVNKIHTTGFKDQNEMLSSLQKLAVLKADLEKKKQSMGKLYSLKQDLLSTLKNKSVTQKTEAWLDNFARCWDNLVQKLEKSTAQISQAVTTTQPSLTQTTVMETVTTVTTREQILVKHAQEELPPPPPQKKRQITVDSEIRKRLDVDITELHSWITRSEAVLQSPEFAIFRKEGNFSDLKEKVNAIEREKAEKFRKLQDASRSAQALVEQMVNEGVNADSIKQASEQLNSRWIEFCQLLSERLNWLEYQNNIIAFYNQLQQLEQMTTTAENWLKIQPTTPSEPTAIKSQLKICKDEVNRLSDLQPQIERLKIQSIALKEKGQGPMFLDADFVAFTNHFKQVFSDVQAREKELQTIFDTLPPMRYQETMSAIRTWVQQSETKLSIPQLSVTDYEIMEQRLGELQALQSSLQEQQSGLYYLSTTVKEMSKKAPSEISRKYQSEFEEIEGRWKKLSSQLVEHCQKLEEQMNKLRKIQNHIQTLKKWMAEVDVFLKEEWPALGDSEILKKQLKQCRLLVSDIQTIQPSLNSVNEGGQKIKNEAEPEFASRLETELKELNTQWDHMCQQVYARKEALKGGLEKTVSLQKDLSEMHEWMTQAEEEYLERDFEYKTPDELQKAVEEMKRAKEEAQQKEAKVKLLTESVNSVIAQAPPVAQEALKKELETLTTNYQWLCTRLNGKCKTLEEVWACWHELLSYLEKANKWLNEVEFKLKTTENIPGGAEEISEVLDSLENLMRHSEDNPNQIRILAQTLTDGGVMDELINEELETFNSRWRELHEEAVRRQKLLEQSIQSAQETEKSLHLIQESLTFIDKQLAAYIADKVDAAQMPQEAQKIQSDLTSHEISLEEMKKHNQGKEAAQRVLSQIDVAQKKLQDVSMKFRLFQKPANFEQRLQESKMILDEVKMHLPALETKSVEQEVVQSQLNHCVNLYKSLSEVKSEVEMVIKTGRQIVQKKQTENPKELDERVTALKLHYNELGAKVTERKQQLEKCLKLSRKMRKEMNVLTEWLAATDMELTKRSAVEGMPSNLDSEVAWGKATQKEIEKQKVHLKSITEVGEALKTVLGKKETLVEDKLSLLNSNWIAVTSRAEEWLNLLLEYQKHMETFDQNVDHITKWIIQADTLLDESEKKKPQQKEDVLKRLKAELNDIRPKVDSTRDQAANLMANRGDHCRKLVEPQISELNHRFAAISHRIKTGKASIPLKELEQFNSDIQKLLEPLEAEIQQGVNLKEEDFNKDMNEDNEGTVKELLQRGDNLQQRITDERKREEIKIKQQLLQTKHNALKDLRSQRRKKALEISHQWYQYKRQADDLLKCLDDIEKKLASLPEPRDERKIKEIDRELQKKKEELNAVRRQAEGLSEDGAAMAVEPTQIQLSKRWREIESKFAQFRRLNFAQIHTVREETMMVMTEDMPLEISYVPSTYLTEITHVSQALLEVEQLLNAPDLCAKDFEDLFKQEESLKNIKDSLQQSSGRIDIIHSKKTAALQSATPVERVKLQEALSQLDFQWEKVNKMYKDRQGRFDRSVEKWRRFHYDIKIFNQWLTEAEQFLRKTQIPENWEHAKYKWYLKELQDGIGQRQTVVRTLNATGEEIIQQSSKTDASILQEKLGSLNLRWQEVCKQLSDRKKRLEEQKNILSEFQRDLNEFVLWLEEADNIASIPLEPGKEQQLKEKLEQVKLLVEELPLRQGILKQLNETGGPVLVSAPISPEEQDKLENKLKQTNLQWIKVSRALPEKQGEIEAQIKDLGQLEKKLEDLEEQLNHLLLWLSPIRNQLEIYNQPNQEGPFDVKETEIAVQAKQPDVEEILSKGQHLYKEKPATQPVKRKLEDLSSEWKAVNRLLQELRAKQPDLAPGLTTIGASPTQTVTLVTQPVVTKETAISKLEMPSSLMLEVPALADFNRAWTELTDWLSLLDQVIKSQRVMVGDLEDINEMIIKQKATMQDLEQRRPQLEELITAAQNLKNKTSNQEARTIITDRIERIQNQWDEVQEHLQNRRQQLNEMLKDSTQWLEAKEEAEQVLGQARAKLESWKEGPYTVDAIQKKITETKQLAKDLRQWQTNVDVANDLALKLLRDYSADDTRKVHMITENINASWRSIHKRVSEREAALEETHRLLQQFPLDLEKFLAWLTEAETTANVLQDATRKERLLEDSKGVKELMKQWQDLQGEIEAHTDVYHNLDENSQKILRSLEGSDDAVLLQRRLDNMNFKWSELRKKSLNIRSHLEASSDQWKRLHLSLQELLVWLQLKDDELSRQAPIGGDFPAVQKQNDVHRAFKRELKTKEPVIMSTLETVRIFLTEQPLEGLEKLYQEPRELPPEERAQNVTRLLRKQAEEVNTEWEKLNLHSADWQRKIDETLERLRELQEATDELDLKLRQAEVIKGSWQPVGDLLIDSLQDHLEKVKALRGEIAPLKENVSHVNDLARQLTTLGIQLSPYNLSTLEDLNTRWKLLQVAVEDRVRQLHEAHRDFGPASQHFLSTSVQGPWERAISPNKVPYYINHETQTTCWDHPKMTELYQSLADLNNVRFSAYRTAMKLRRLQKALCLDLLSLSAACDALDQHNLKQNDQPMDILQIINCLTTIYDRLEQEHNNLVNVPLCVDMCLNWLLNVYDTGRTGRIRVLSFKTGIISLCKAHLEDKYRYLFKQVASSTGFCDQRRLGLLLHDSIQIPRQLGEVASFGGSNIEPSVRSCFQFANNKPEIEAALFLDWMRLEPQSMVWLPVLHRVAAAETAKHQAKCNICKECPIIGFRYRSLKHFNYDICQSCFFSGRVAKGHKMHYPMVEYCTPTTSGEDVRDFAKVLKNKFRTKRYFAKHPRMGYLPVQTVLEGDNMETNLQAEYDRLKQQHEHKGLSPLPSPPEMMPTSPQSPRDAELIAEAKLLRQHKGRLEARMQILEDHNKQLESQLHRLRQLLEQPQAEAKVNGTTVSSPSTSLQRSDSSQPMLLRVVGSQTSDSMGEEDLLSPPQDTSTGLEEVMEQLNNSFPSSRGHNVGSLFHMADDLGRAMESLVSVMTDEEGAE

SEQ ID NO: 66 - DNA, 11474 bp, Homo sapiens
actttccccctacaggactcagatctgggaggcaattaccttcggagaaaaacgaataggaaaaactgaagtgttactttttttaaagctgctgaagtttgttggtttctcattgtttttaagcctactggagcaataaagtttgaagaacttttaccaggttttttttatcgctgccttgatatacacttttcaaaatgctttggtgggaagaagtagaggactgttatgaaagagaagatgttcaaaagaaaacattcacaaaatgggtaaatgcacaattttctaagtttgggaagcagcatattgagaacctcttcagtgacctacaggatgggaggcgcctcctagacctcctcgaaggcctgacagggcaaaaactgccaaaagaaaaaggatccacaagagttcatgccctgaacaatgtcaacaaggcactgcgggttttgcagaacaataatgttgatttagtgaatattggaagtactgacatcgtagatggaaatcataaactgactcttggtttgatttggaatataatcctccactggcaggtcaaaaatgtaatgaaaaatatcatggctggattgcaacaaaccaacagtgaaaagattctcctgagctgggtccgacaatcaactcgtaattatccacaggttaatgtaatcaacttcaccaccagctggtctgatggcctggctttgaatgctctcatccatagtcataggccagacctatttgactggaatagtgtggtttgccagcagtcagccacacaacgactggaacatgcattcaacatcgccagatatcaattaggcatagagaaactactcgatcctgaagatgttgataccacctatccagataagaagtccatcttaatgtacatcacatcactcttccaagttttgcctcaacaagtgagcattgaagccatccaggaagtggaaatgttgccaaggccacctaaagtgactaaagaagaacattttcagttacatcatcaaatgcactattctcaacagatcacggtcagtctagcacagggatatgagagaacttcttcccctaagcctcgattcaagagctatgcctacacacaggctgcttatgtcaccacctctgaccctacacggagcccatttccttcacagcatttggaagctcctgaagacaagtcatttggcagttcattgatggagagtgaagtaaacctggaccgttatcaaacagctttagaagaagtattatcgtggcttctttctgctgaggacacattgcaagcacaaggagagatttctaatgatgtggaagtggtgaaagaccagtttcatactcatgaggggtacatgatggatttgacagcccatcagggccgggttggtaatattctacaattgggaagtaagctgattggaacaggaaaattatcagaagatgaagaaactgaagtacaagagcagatgaatctcctaaattcaagatgggaatgcctcagggtagctagcatggaaaaacaaagcaatttacatagagttttaatggatctccagaatcagaaactgaaagagttgaatgactggctaacaaaaacagaagaaagaacaaggaaaatggaggaagagcctcttggacctgatcttgaagacctaaaacgccaagtacaacaacataaggtgcttcaagaagatctagaacaagaacaagtcagggtcaattctctcactcacatggtggtggtagttgatgaatctagtggagatcacgcaactgctgctttggaagaacaacttaaggtattgggagatcgatgggcaaacatctgtagatggacagaagaccgctgggttcttttacaagacatccttctcaaatggcaacgtcttactgaagaacagtgcctttttagtgcatggctttcagaaaaagaagatgcagtgaacaagattcacacaactggctttaaagatcaaaatgaaatgttatcaagtcttcaaaaactggccgttttaaaagcggatctagaaaagaaaaagcaatccatgggcaaactgtattcactcaaacaagatcttctttcaacactgaagaataagtcagtgacccagaagacggaagcatggctggataactttgcccggtgttgggataatttagtccaaaaacttgaaaagagtacagcacagatttcacaggctgtcaccaccactcagccatcactaacacagacaactgtaatggaaacagtaactacggtgaccacaagggaacagatcctggtaaagcatgctcaagaggaacttccaccaccacctccccaaaagaagaggcagattactgtggattctgaaattaggaaaaggttggatgttgatataactgaacttcacagctggattactcgctcagaagctgtgttgcagagtcctgaatttgcaatctttcggaaggaaggcaacttctcagacttaaaagaaaaagtcaatgccatagagcgagaaaaagctgagaagttcagaaaactgcaagatgccagcagatcagctcaggccctggtggaacagatggtgaatgagggtgttaatgcagatagcatcaaacaagcctcagaacaactgaacagccggtggatcgaattctgccagttgctaagtgagagacttaactggctggagtatcagaacaacatcatcgctttctataatcagctacaacaattggagcagatgacaactactgctgaaaactggttgaaaatccaacccaccaccccatcagagccaacagcaattaaaagtcagttaaaaatttgtaaggatgaagtcaaccggctatcagatcttcaacctcaaattgaacgattaaaaattcaaagcatagccctgaaagagaaaggacaaggacccatgttcctggatgcagactttgtggcctttacaaatcattttaagcaagtcttttctgatgtgcaggccagagagaaagagctacagacaatttttgacactttgccaccaatgcgctatcaggagaccatgagtgccatcaggacatgggtccagcagtcagaaaccaaactctccatacctcaacttagtgtcaccgactatgaaatcatggagcagagactcggggaattgcaggctttacaaagttctctgcaagagcaacaaagtggcctatactatctcagcaccactgtgaaagagatgtcgaagaaagcgccctctgaaattagccggaaatatcaatcagaatttgaagaaattgagggacgctggaagaagctctcctcccagctggttgagcattgtcaaaagctagaggagcaaatgaataaactccgaaaaattcagaatcacatacaaaccctgaagaaatggatggctgaagttgatgtttttctgaaggaggaatggcctgcccttggggattcagaaattctaaaaaagcagctgaaacagtgcagacttttagtcagtgatattcagacaattcagcccagtctaaacagtgtcaatgaaggtgggcagaagataaagaatgaagcagagccagagtttgcttcgagacttgagacagaactcaaagaacttaacactcagtgggatcacatgtgccaacaggtctatgccagaaaggaggccttgaagggaggtttggagaaaactgtaagcctccagaaagatctatcagagatgcacgaatggatgacacaagctgaagaagagtatcttgagagagattttgaatataaaactccagatgaattacagaaagcagttgaagagatgaagagagctaaagaagaggcccaacaaaaagaagcgaaagtgaaactccttactgagtctgtaaatagtgtcatagctcaagctccacctgtagcacaagaggccttaaaaaaggaacttgaaactctaaccaccaactaccagtggctctgcactaggctgaatgggaaatgcaagactttggaagaagtttgggcatgttggcatgagttattgtcatacttggagaaagcaaacaagtggctaaatgaagtagaatttaaacttaaaaccactgaaaacattcctggcggagctgaggaaatctctgaggtgctagattcacttgaaaatttgatgcgacattcagaggataacccaaatcagattcgcatattggcacagaccctaacagatggcggagtcatggatgagctaatcaatgaggaacttgagacatttaattctcgttggagggaactacatgaagaggctgtaaggaggcaaaagttgcttgaacagagcatccagtctgcccaggagactgaaaaatccttacacttaatccaggagtccctcacattcattgacaagcagttggcagcttatattgcagacaaggtggacgcagctcaaatgcctcaggaagcccagaaaatccaatctgatttgacaagtcatgagatcagtttagaagaaatgaagaaacataatcaggggaaggaggctgcccaaagagtcctgtctcagattgatgttgcacagaaaaaattacaagatgtctccatgaagtttcgattattccagaaaccagccaattttgagcagcgtctacaagaaagtaagatgattttagatgaagtgaagatgcacttgcctgcattggaaacaaagagtgtggaacaggaagtagtacagtcacagctaaatcattgtgtgaacttgtataaaagtctgagtgaagtgaagtctgaagtggaaatggtgataaagactggacgtcagattgtacagaaaaagcagacggaaaatcccaaagaacttgatgaaagagtaacagctttgaaattgcattataatgagctgggagcaaaggtaacagaaagaaagcaacagttggagaaatgcttgaaattgtcccgtaagatgcgaaaggaaatgaatgtcttgacagaatggctggcagctacagatatggaattgacaaagagatcagcagttgaaggaatgcctagtaatttggattctgaagttgcctggggaaaggctactcaaaaagagattgagaaacagaaggtgcacctgaagagtatcacagaggtaggagaggccttgaaaacagttttgggcaagaaggagacgttggtggaagataaactcagtcttctgaatagtaactggatagctgtcacctcccgagcagaagagtggttaaatcttttgttggaataccagaaacacatggaaacttttgaccagaatgtggaccacatcacaaagtggatcattcaggctgacacacttttggatgaatcagagaaaaagaaaccccagcaaaaagaagacgtgcttaagcgtttaaaggcagaactgaatgacatacgcccaaaggtggactctacacgtgaccaagcagcaaacttgatggcaaaccgcggtgaccactgcaggaaattagtagagccccaaatctcagagctcaaccatcgatttgcagccatttcacacagaattaagactggaaaggcctccattcctttgaaggaattggagcagtttaactcagatatacaaaaattgcttgaaccactggaggctgaaattcagcagggggtgaatctgaaagaggaagacttcaataaagatatgaatgaagacaatgagggtactgtaaaagaattgttgcaaagaggagacaacttacaacaaagaatcacagatgagagaaagcgagaggaaataaagataaaacagcagctgttacagacaaaacataatgctctcaaggatttgaggtctcaaagaagaaaaaaggctctagaaatttctcatcagtggtatcagtacaagaggcaggctgatgatctcctgaaatgcttggatgacattgaaaaaaaattagccagcctacctgagcccagagatgaaaggaaaataaaggaaattgatcgggaattgcagaagaagaaagaggagctgaatgcagtgcgtaggcaagctgagggcttgtctgaggatggggccgcaatggcagtggagccaactcagatccagctcagcaagcgctggcgggaaattgagagcaaatttgctcagtttcgaagactcaactttgcacaaattcacactgtccgtgaagaaacgatgatggtgatgactgaagacatgcctttggaaatttcttatgtgccttctacttatttgactgaaatcactcatgtctcacaagccctattagaagtggaacaacttctcaatgctcctgacctctgtgctaaggactttgaagatctctttaagcaagaggagtctctgaagaatataaaagatagtctacaacaaagctcaggtcggattgacattattcatagcaagaagacagcagcattgcaaagtgcaacgcctgtggaaagggtgaagctacaggaagctctctcccagcttgatttccaatgggaaaaagttaacaaaatgtacaaggaccgacaagggcgatttgacagatctgttgagaaatggcggcgttttcattatgatataaagatatttaatcagtggctaacagaagctgaacagtttctcagaaagacacaaattcctgagaattgggaacatgctaaatacaaatggtatcttaaggaactccaggatggcattgggcagcggcaaactgttgtcagaacattgaatgcaactggggaagaaataattcagcaatcctcaaaaacagatgccagtattctacaggaaaaattgggaagcctgaatctgcggtggcaggaggtctgcaaacagctgtcagacagaaaaaagaggctagaagaacaaaagaatatcttgtcagaatttcaaagagatttaaatgaatttgttttatggttggaggaagcagataacattgctagtatcccacttgaacctggaaaagagcagcaactaaaagaaaagcttgagcaagtcaagttactggtggaagagttgcccctgcgccagggaattctcaaacaattaaatgaaactggaggacccgtgcttgtaagtgctcccataagcccagaagagcaagataaacttgaaaataagctcaagcagacaaatctccagtggataaaggtttccagagctttacctgagaaacaaggagaaattgaagctcaaataaaagaccttgggcagcttgaaaaaaagcttgaagaccttgaagagcagttaaatcatctgctgctgtggttatctcctattaggaatcagttggaaatttataaccaaccaaaccaagaaggaccatttgacgttaaggaaactgaaatagcagttcaagctaaacaaccggatgtggaagagattttgtctaaagggcagcatttgtacaaggaaaaaccagccactcagccagtgaagaggaagttagaagatctgagctctgagtggaaggcggtaaaccgtttacttcaagagctgagggcaaagcagcctgacctagctcctggactgaccactattggagcctctcctactcagactgttactctggtgacacaacctgtggttactaaggaaactgccatctccaaactagaaatgccatcttccttgatgttggaggtacctgctctggcagatttcaaccgggcttggacagaacttaccgactggctttctctgcttgatcaagttataaaatcacagagggtgatggtgggtgaccttgaggatatcaacgagatgatcatcaagcagaaggcaacaatgcaggatttggaacagaggcgtccccagttggaagaactcattaccgctgcccaaaatttgaaaaacaagaccagcaatcaagaggctagaacaatcattacggatcgaattgaaagaattcagaatcagtgggatgaagtacaagaacaccttcagaaccggaggcaacagttgaatgaaatgttaaaggattcaacacaatggctggaagctaaggaagaagctgagcaggtcttaggacaggccagagccaagcttgagtcatggaaggagggtccctatacagtagatgcaatccaaaagaaaatcacagaaaccaagcagttggccaaagacctccgccagtggcagacaaatgtagatgtggcaaatgacttggccctgaaacttctccgggattattctgcagatgataccagaaaagtccacatgataacagagaatatcaatgcctcttggagaagcattcataaaagggtgagtgagcgagaggctgctttggaagaaactcatagattactgcaacagttccccctggacctggaaaagtttcttgcctggcttacagaagctgaaacaactgccaatgtcctacaggatgctacccgtaaggaaaggctcctagaagactccaagggagtaaaagagctgatgaaacaatggcaagacctccaaggtgaaattgaagctcacacagatgtttatcacaacctggatgaaaacagccaaaaaatcctgagatccctggaaggttccgatgatgcagtcctgttacaaagacgtttggataacatgaacttcaagtggagtgaacttcggaaaaagtctctcaacattaggtcccatttggaagccagttctgaccagtggaagcgtctgcacctttctctgcaggaacttctggtgtggctacagctgaaagatgatgaattaagccggcaggcacctattggaggcgactttccagcagttcagaagcagaacgatgtacatagggccttcaagagggaattgaaaactaaagaacctgtaatcatgagtactcttgagactgtacgaatatttctgacagagcagcctttggaaggactagagaaactctaccaggagcccagagagctgcctcctgaggagagagcccagaatgtcactcggcttctacgaaagcaggctgaggaggtcaatactgagtgggaaaaattgaacctgcactccgctgactggcagagaaaaatagatgagacccttgaaagactccgggaacttcaagaggccacggatgagctggacctcaagctgcgccaagctgaggtgatcaagggatcctggcagcccgtgggcgatctcctcattgactctctccaagatcacctcgagaaagtcaaggcacttcgaggagaaattgcgcctctgaaagagaacgtgagccacgtcaatgaccttgctcgccagcttaccactttgggcattcagctctcaccgtataacctcagcactctggaagacctgaacaccagatggaagcttctgcaggtggccgtcgaggaccgagtcaggcagctgcatgaagcccacagggactttggtccagcatctcagcactttctttccacgtctgtccagggtccctgggagagagccatctcgccaaacaaagtgccctactatatcaaccacgagactcaaacaacttgctgggaccatcccaaaatgacagagctctaccagtctttagctgacctgaataatgtcagattctcagcttataggactgccatgaaactccgaagactgcagaaggccctttgcttggatctcttgagcctgtcagctgcatgtgatgccttggaccagcacaacctcaagcaaaatgaccagcccatggatatcctgcagattattaattgtttgaccactatttatgaccgcctggagcaagagcacaacaatttggtcaacgtccctctctgcgtggatatgtgtctgaactggctgctgaatgtttatgatacgggacgaacagggaggatccgtgtcctgtcttttaaaactggcatcatttccctgtgtaaagcacatttggaagacaagtacagataccttttcaagcaagtggcaagttcaacaggattttgtgaccagcgcaggctgggcctccttctgcatgattctatccaaattccaagacagttgggtgaagttgcatcctttgggggcagtaacattgagccaagtgtccggagctgcttccaattttcccaatctctggaaaccacagctctgttttctgttcctgtaattttgccttttcctgaactggattttaaaggattgtaggaggcagtagtggaagagctaactttatatcttgttcttttacataatgcgccctgatccacacttgggaaagtatattccatggtacctatagacagatatatgtgctttaccatgtatatgtgaaacttttctaatttaactttcctgttaaattagaactcggtagcataaattaatactgttgagtatacttagggatttgcatagatttaaaattgtgcatatgttccctagggccatggcgttaattggtttattagtcaggtggagtgcagagcctgaggtcaggacagttgtccttgaacatggaaatgaagagtggataatcaccatgtgttattgtttgggctgattttatctttaatgggtgattcagagtcctgattaatatttagagcagtgactgctggcctcctacctgctcattatcttcagaactttaaataaaatacttgatttctacccaagatggtagttatgggaagccttttacttcttcttgtctcacaaagacaactcttgacctctcaatccttaaacaaaaagttctgcttctgcgcatgtggggactcttaaactcattttcatgcctggagattcacatttagggatctaggaaaagcacatctaggcagagtcgatgaggagatgctttaagaaccgtgacaaggacaggaaggaaatcaattttgcgttaggtttgtatttttagagaaaacgaatcctggggaacttttcacactcattactattgacattaataccattgtcctgtccctttcacagttactaaaatcactcttgcccaccctcctgccttgcccacaacctattcccatgaaggggtgacttgggagaaataacggtttccaaccaacgttttattttggaaacatttcaagcacaaagagtagttgaaaggatagtctaaagaacactcatctgtgtcatacatctgttcaatccatggttgcttttcgctctacttacctcctccaccctctcagctctgtttatgtatgtgtctgtctgtgtacatacacacacaaacacattttcccctatgccatttaaaagtaaaggagcatcacaacataaacccctaaacacttcaccatacaccattttcttaaaggatgacattctctaacataactgcaatgctatcgttacacacaaatttaacagcaatccagcaataccctctgatatgcagtccacactgaactttccccagtgccccagaattgttccttatagccactgttttcttccagcatctagtcaaggtttttgtctgtcatgtctctgtaccttcatttagttttgaacagtctcccagcattttgttttcctttcatgacattgacttttttggtaggggga

SEQ ID NO: 67 - protein, 3295 aa, Homo sapiens
MLWWEEVEDCYEREDVQKKTFTKWVNAQFSKFGKQHIENLFSDLQDGRRLLDLLEGLTGQKLPKEKGSTRVHALNNVNKALRVLQNNNVDLVNIGSTDIVDGNHKLTLGLIWNIILHWQVKNVMKNIMAGLQQTNSEKILLSWVRQSTRNYPQVNVINFTTSWSDGLALNALIHSHRPDLFDWNSVVCQQSATQRLEHAFNIARYQLGIEKLLDPEDVDTTYPDKKSILMYITSLFQVLPQQVSIEAIQEVEMLPRPPKVTKEEHFQLHHQMHYSQQITVSLAQGYERTSSPKPRFKSYAYTQAAYVTTSDPTRSPFPSQHLEAPEDKSFGSSLMESEVNLDRYQTALEEVLSWLLSAEDTLQAQGEISNDVEVVKDQFHTHEGYMMDLTAHQGRVGNILQLGSKLIGTGKLSEDEETEVQEQMNLLNSRWECLRVASMEKQSNLHRVLMDLQNQKLKELNDWLTKTEERTRKMEEEPLGPDLEDLKRQVQQHKVLQEDLEQEQVRVNSLTHMVVVVDESSGDHATAALEEQLKVLGDRWANICRWTEDRWVLLQDILLKWQRLTEEQCLFSAWLSEKEDAVNKIHTTGFKDQNEMLSSLQKLAVLKADLEKKKQSMGKLYSLKQDLLSTLKNKSVTQKTEAWLDNFARCWDNLVQKLEKSTAQISQAVTTTQPSLTQTTVMETVTTVTTREQILVKHAQEELPPPPPQKKRQITVDSEIRKRLDVDITELHSWITRSEAVLQSPEFAIFRKEGNFSDLKEKVNAIEREKAEKFRKLQDASRSAQALVEQMVNEGVNADSIKQASEQLNSRWIEFCQLLSERLNWLEYQNNIIAFYNQLQQLEQMTTTAENWLKIQPTTPSEPTAIKSQLKICKDEVNRLSDLQPQIERLKIQSIALKEKGQGPMFLDADFVAFTNHFKQVFSDVQAREKELQTIFDTLPPMRYQETMSAIRTWVQQSETKLSIPQLSVTDYEIMEQRLGELQALQSSLQEQQSGLYYLSTTVKEMSKKAPSEISRKYQSEFEEIEGRWKKLSSQLVEHCQKLEEQMNKLRKIQNHIQTLKKWMAEVDVFLKEEWPALGDSEILKKQLKQCRLLVSDIQTIQPSLNSVNEGGQKIKNEAEPEFASRLETELKELNTQWDHMCQQVYARKEALKGGLEKTVSLQKDLSEMHEWMTQAEEEYLERDFEYKTPDELQKAVEEMKRAKEEAQQKEAKVKLLTESVNSVIAQAPPVAQEALKKELETLTTNYQWLCTRLNGKCKTLEEVWACWHELLSYLEKANKWLNEVEFKLKTTENIPGGAEEISEVLDSLENLMRHSEDNPNQIRILAQTLTDGGVMDELINEELETFNSRWRELHEEAVRRQKLLEQSIQSAQETEKSLHLIQESLTFIDKQLAAYIADKVDAAQMPQEAQKIQSDLTSHEISLEEMKKHNQGKEAAQRVLSQIDVAQKKLQDVSMKFRLFQKPANFEQRLQESKMILDEVKMHLPALETKSVEQEVVQSQLNHCVNLYKSLSEVKSEVEMVIKTGRQIVQKKQTENPKELDERVTALKLHYNELGAKVTERKQQLEKCLKLSRKMRKEMNVLTEWLAATDMELTKRSAVEGMPSNLDSEVAWGKATQKEIEKQKVHLKSITEVGEALKTVLGKKETLVEDKLSLLNSNWIAVTSRAEEWLNLLLEYQKHMETFDQNVDHITKWIIQADTLLDESEKKKPQQKEDVLKRLKAELNDIRPKVDSTRDQAANLMANRGDHCRKLVEPQISELNHRFAAISHRIKTGKASIPLKELEQFNSDIQKLLEPLEAEIQQGVNLKEEDFNKDMNEDNEGTVKELLQRGDNLQQRITDERKREEIKIKQQLLQTKHNALKDLRSQRRKKALEISHQWYQYKRQADDLLKCLDDIEKKLASLPEPRDERKIKEIDRELQKKKEELNAVRRQAEGLSEDGAAMAVEPTQIQLSKRWREIESKFAQFRRLNFAQIHTVREETMMVMTEDMPLEISYVPSTYLTEITHVSQALLEVEQLLNAPDLCAKDFEDLFKQEESLKNIKDSLQQSSGRIDIIHSKKTAALQSATPVERVKLQEALSQLDFQWEKVNKMYKDRQGRFDRSVEKWRRFHYDIKIFNQWLTEAEQFLRKTQIPENWEHAKYKWYLKELQDGIGQRQTVVRTLNATGEEIIQQSSKTDASILQEKLGSLNLRWQEVCKQLSDRKKRLEEQKNILSEFQRDLNEFVLWLEEADNIASIPLEPGKEQQLKEKLEQVKLLVEELPLRQGILKQLNETGGPVLVSAPISPEEQDKLENKLKQTNLQWIKVSRALPEKQGEIEAQIKDLGQLEKKLEDLEEQLNHLLLWLSPIRNQLEIYNQPNQEGPFDVKETEIAVQAKQPDVEEILSKGQHLYKEKPATQPVKRKLEDLSSEWKAVNRLLQELRAKQPDLAPGLTTIGASPTQTVTLVTQPVVTKETAISKLEMPSSLMLEVPALADFNRAWTELTDWLSLLDQVIKSQRVMVGDLEDINEMIIKQKATMQDLEQRRPQLEELITAAQNLKNKTSNQEARTIITDRIERIQNQWDEVQEHLQNRRQQLNEMLKDSTQWLEAKEEAEQVLGQARAKLESWKEGPYTVDAIQKKITETKQLAKDLRQWQTNVDVANDLALKLLRDYSADDTRKVHMITENINASWRSIHKRVSEREAALEETHRLLQQFPLDLEKFLAWLTEAETTANVLQDATRKERLLEDSKGVKELMKQWQDLQGEIEAHTDVYHNLDENSQKILRSLEGSDDAVLLQRRLDNMNFKWSELRKKSLNIRSHLEASSDQWKRLHLSLQELLVWLQLKDDELSRQAPIGGDFPAVQKQNDVHRAFKRELKTKEPVIMSTLETVRIFLTEQPLEGLEKLYQEPRELPPEERAQNVTRLLRKQAEEVNTEWEKLNLHSADWQRKIDETLERLRELQEATDELDLKLRQAEVIKGSWQPVGDLLIDSLQDHLEKVKALRGEIAPLKENVSHVNDLARQLTTLGIQLSPYNLSTLEDLNTRWKLLQVAVEDRVRQLHEAHRDFGPASQHFLSTSVQGPWERAISPNKVPYYINHETQTTCWDHPKMTELYQSLADLNNVRFSAYRTAMKLRRLQKALCLDLLSLSAACDALDQHNLKQNDQPMDILQIINCLTTIYDRLEQEHNNLVNVPLCVDMCLNWLLNVYDTGRTGRIRVLSFKTGIISLCKAHLEDKYRYLFKQVASSTGFCDQRRLGLLLHDSIQIPRQLGEVASFGGSNIEPSVRSCFQFSQSLETTALFSVPVILPFPELDFKGL

SEQ ID NO: 68 - DNA, 10795 bp, Homo sapiens
actttccccctacaggactcagatctgggaggcaattaccttcggagaaaaacgaataggaaaaactgaagtgttactttttttaaagctgctgaagtttgttggtttctcattgtttttaagcctactggagcaataaagtttgaagaacttttaccaggttttttttatcgctgccttgatatacacttttcaaaatgctttggtgggaagaagtagaggactgttatgaaagagaagatgttcaaaagaaaacattcacaaaatgggtaaatgcacaattttctaagtttgggaagcagcatattgagaacctcttcagtgacctacaggatgggaggcgcctcctagacctcctcgaaggcctgacagggcaaaaactgccaaaagaaaaaggatccacaagagttcatgccctgaacaatgtcaacaaggcactgcgggttttgcagaacaataatgttgatttagtgaatattggaagtactgacatcgtagatggaaatcataaactgactcttggtttgatttggaatataatcctccactggcaggtcaaaaatgtaatgaaaaatatcatggctggattgcaacaaaccaacagtgaaaagattctcctgagctgggtccgacaatcaactcgtaattatccacaggttaatgtaatcaacttcaccaccagctggtctgatggcctggctttgaatgctctcatccatagtcataggccagacctatttgactggaatagtgtggtttgccagcagtcagccacacaacgactggaacatgcattcaacatcgccagatatcaattaggcatagagaaactactcgatcctgaagatgttgataccacctatccagataagaagtccatcttaatgtacatcacatcactcttccaagttttgcctcaacaagtgagcattgaagccatccaggaagtggaaatgttgccaaggccacctaaagtgactaaagaagaacattttcagttacatcatcaaatgcactattctcaacagatcacggtcagtctagcacagggatatgagagaacttcttcccctaagcctcgattcaagagctatgcctacacacaggctgcttatgtcaccacctctgaccctacacggagcccatttccttcacagcatttggaagctcctgaagacaagtcatttggcagttcattgatggagagtgaagtaaacctggaccgttatcaaacagctttagaagaagtattatcgtggcttctttctgctgaggacacattgcaagcacaaggagagatttctaatgatgtggaagtggtgaaagaccagtttcatactcatgaggggtacatgatggatttgacagcccatcagggccgggttggtaatattctacaattgggaagtaagctgattggaacaggaaaattatcagaagatgaagaaactgaagtacaagagcagatgaatctcctaaattcaagatgggaatgcctcagggtagctagcatggaaaaacaaagcaatttacatagagttttaatggatctccagaatcagaaactgaaagagttgaatgactggctaacaaaaacagaagaaagaacaaggaaaatggaggaagagcctcttggacctgatcttgaagacctaaaacgccaagtacaacaacataaggtgcttcaagaagatctagaacaagaacaagtcagggtcaattctctcactcacatggtggtggtagttgatgaatctagtggagatcacgcaactgctgctttggaagaacaacttaaggtattgggagatcgatgggcaaacatctgtagatggacagaagaccgctgggttcttttacaagacatccttctcaaatggcaacgtcttactgaagaacagtgcctttttagtgcatggctttcagaaaaagaagatgcagtgaacaagattcacacaactggctttaaagatcaaaatgaaatgttatcaagtcttcaaaaactggccgttttaaaagcggatctagaaaagaaaaagcaatccatgggcaaactgtattcactcaaacaagatcttctttcaacactgaagaataagtcagtgacccagaagacggaagcatggctggataactttgcccggtgttgggataatttagtccaaaaacttgaaaagagtacagcacagatttcacaggctgtcaccaccactcagccatcactaacacagacaactgtaatggaaacagtaactacggtgaccacaagggaacagatcctggtaaagcatgctcaagaggaacttccaccaccacctccccaaaagaagaggcagattactgtggattctgaaattaggaaaaggttggatgttgatataactgaacttcacagctggattactcgctcagaagctgtgttgcagagtcctgaatttgcaatctttcggaaggaaggcaacttctcagacttaaaagaaaaagtcaatgccatagagcgagaaaaagctgagaagttcagaaaactgcaagatgccagcagatcagctcaggccctggtggaacagatggtgaatgagggtgttaatgcagatagcatcaaacaagcctcagaacaactgaacagccggtggatcgaattctgccagttgctaagtgagagacttaactggctggagtatcagaacaacatcatcgctttctataatcagctacaacaattggagcagatgacaactactgctgaaaactggttgaaaatccaacccaccaccccatcagagccaacagcaattaaaagtcagttaaaaatttgtaaggatgaagtcaaccggctatcagatcttcaacctcaaattgaacgattaaaaattcaaagcatagccctgaaagagaaaggacaaggacccatgttcctggatgcagactttgtggcctttacaaatcattttaagcaagtcttttctgatgtgcaggccagagagaaagagctacagacaatttttgacactttgccaccaatgcgctatcaggagaccatgagtgccatcaggacatgggtccagcagtcagaaaccaaactctccatacctcaacttagtgtcaccgactatgaaatcatggagcagagactcggggaattgcaggctttacaaagttctctgcaagagcaacaaagtggcctatactatctcagcaccactgtgaaagagatgtcgaagaaagcgccctctgaaattagccggaaatatcaatcagaatttgaagaaattgagggacgctggaagaagctctcctcccagctggttgagcattgtcaaaagctagaggagcaaatgaataaactccgaaaaattcagaatcacatacaaaccctgaagaaatggatggctgaagttgatgtttttctgaaggaggaatggcctgcccttggggattcagaaattctaaaaaagcagctgaaacagtgcagacttttagtcagtgatattcagacaattcagcccagtctaaacagtgtcaatgaaggtgggcagaagataaagaatgaagcagagccagagtttgcttcgagacttgagacagaactcaaagaacttaacactcagtgggatcacatgtgccaacaggtctatgccagaaaggaggccttgaagggaggtttggagaaaactgtaagcctccagaaagatctatcagagatgcacgaatggatgacacaagctgaagaagagtatcttgagagagattttgaatataaaactccagatgaattacagaaagcagttgaagagatgaagagagctaaagaagaggcccaacaaaaagaagcgaaagtgaaactccttactgagtctgtaaatagtgtcatagctcaagctccacctgtagcacaagaggccttaaaaaaggaacttgaaactctaaccaccaactaccagtggctctgcactaggctgaatgggaaatgcaagactttggaagaagtttgggcatgttggcatgagttattgtcatacttggagaaagcaaacaagtggctaaatgaagtagaatttaaacttaaaaccactgaaaacattcctggcggagctgaggaaatctctgaggtgctagattcacttgaaaatttgatgcgacattcagaggataacccaaatcagattcgcatattggcacagaccctaacagatggcggagtcatggatgagctaatcaatgaggaacttgagacatttaattctcgttggagggaactacatgaagaggctgtaaggaggcaaaagttgcttgaacagagcatccagtctgcccaggagactgaaaaatccttacacttaatccaggagtccctcacattcattgacaagcagttggcagcttatattgcagacaaggtggacgcagctcaaatgcctcaggaagcccagaaaatccaatctgatttgacaagtcatgagatcagtttagaagaaatgaagaaacataatcaggggaaggaggctgcccaaagagtcctgtctcagattgatgttgcacagaaaaaattacaagatgtctccatgaagtttcgattattccagaaaccagccaattttgagcagcgtctacaagaaagtaagatgattttagatgaagtgaagatgcacttgcctgcattggaaacaaagagtgtggaacaggaagtagtacagtcacagctaaatcattgtgtgaacttgtataaaagtctgagtgaagtgaagtctgaagtggaaatggtgataaagactggacgtcagattgtacagaaaaagcagacggaaaatcccaaagaacttgatgaaagagtaacagctttgaaattgcattataatgagctgggagcaaaggtaacagaaagaaagcaacagttggagaaatgcttgaaattgtcccgtaagatgcgaaaggaaatgaatgtcttgacagaatggctggcagctacagatatggaattgacaaagagatcagcagttgaaggaatgcctagtaatttggattctgaagttgcctggggaaaggctactcaaaaagagattgagaaacagaaggtgcacctgaagagtatcacagaggtaggagaggccttgaaaacagttttgggcaagaaggagacgttggtggaagataaactcagtcttctgaatagtaactggatagctgtcacctcccgagcagaagagtggttaaatcttttgttggaataccagaaacacatggaaacttttgaccagaatgtggaccacatcacaaagtggatcattcaggctgacacacttttggatgaatcagagaaaaagaaaccccagcaaaaagaagacgtgcttaagcgtttaaaggcagaactgaatgacatacgcccaaaggtggactctacacgtgaccaagcagcaaacttgatggcaaaccgcggtgaccactgcaggaaattagtagagccccaaatctcagagctcaaccatcgatttgcagccatttcacacagaattaagactggaaaggcctccattcctttgaaggaattggagcagtttaactcagatatacaaaaattgcttgaaccactggaggctgaaattcagcagggggtgaatctgaaagaggaagacttcaataaagatatgaatgaagacaatgagggtactgtaaaagaattgttgcaaagaggagacaacttacaacaaagaatcacagatgagagaaagcgagaggaaataaagataaaacagcagctgttacagacaaaacataatgctctcaaggatttgaggtctcaaagaagaaaaaaggctctagaaatttctcatcagtggtatcagtacaagaggcaggctgatgatctcctgaaatgcttggatgacattgaaaaaaaattagccagcctacctgagcccagagatgaaaggaaaataaaggaaattgatcgggaattgcagaagaagaaagaggagctgaatgcagtgcgtaggcaagctgagggcttgtctgaggatggggccgcaatggcagtggagccaactcagatccagctcagcaagcgctggcgggaaattgagagcaaatttgctcagtttcgaagactcaactttgcacaaattcacactgtccgtgaagaaacgatgatggtgatgactgaagacatgcctttggaaatttcttatgtgccttctacttatttgactgaaatcactcatgtctcacaagccctattagaagtggaacaacttctcaatgctcctgacctctgtgctaaggactttgaagatctctttaagcaagaggagtctctgaagaatataaaagatagtctacaacaaagctcaggtcggattgacattattcatagcaagaagacagcagcattgcaaagtgcaacgcctgtggaaagggtgaagctacaggaagctctctcccagcttgatttccaatgggaaaaagttaacaaaatgtacaaggaccgacaagggcgatttgacagatctgttgagaaatggcggcgttttcattatgatataaagatatttaatcagtggctaacagaagctgaacagtttctcagaaagacacaaattcctgagaattgggaacatgctaaatacaaatggtatcttaagagaacaggagacagaggacttatccttcttgatgatgtcatttgaaaagaatggctttcaggtccttgagtgagagacacttctgatttccaagagctacatgttcacaattgtaagcccttttgagtaaatgttctaagaaacggaggtaagagtcctatcaacagatgtgtgttggctagaacaaacattaaattttcctggcagcactgagctttctcaagcaggcacttaagggaaggctagggtcatcctagggacatggccttctggggctagaaaccatactagagtttagtcaagtcttagtgcaagggtttggacagagttgttaagtgctgagagttctgtatttctcactgtcacaaaggaagatcagaagctcctgatacttttttcatcagtacaattgaatatataaatcctatacacaaaaataaactaagcttatacaagcatattggtcaaggaatgttgctggccttattaattagatagcccagttaaaagaagaattttttaatataattaatgttaaagtaggatgatagtatataaaacgtgtctactgtcctgaatacaaactaaactgtttggtttagcatttacctcaagatctcttaatatcccccaaagggtccctaaaaccacaacttatctttgtgctcatgaagtagagaagagacagttaatagacatttctagctgatagactgttgtagagcagagaacgctctgtgtttttgaaaattaaacatatgaatttgcccctcttcccctattaaggaagaagagtttcttaattgtgcgaacacatcaagtgaactattcaattagatttttgtgacccagggtataaacatctggttaaggttacatatttcaaaggaacaaaacactagaaactcttggttttaaatctcatggctggaggataatttgcagcagagatttatctggcaagcatacagaattgctgagactgttctaaagatgtaagtgtgggtgtttgtgtcgtgaaaatagctgtttacatctattaagtggataccgatggttgaaagtgccgtctatgtcaagtttttaccaaatcaacttttgcctcactgtgtcagaccattttacctaatcaacttggactgctaatgtcctttcccctggcaccactatctgtctcttttgcaaagcacagaaacggcatgcatgattgtagtttataaaacacatgtaccaatgtggtctacagcttctgttgagttcgagagggtcagtttctgtaatctcttctggcacagagtcaagaacagcttcactttcctcctgctacctctctacccgtaagtgtgaacccatcactttgctaacactcaggaaggggattacacaaaatagagcaggagccctctgacctgaatatgcatctgagccctagccatagagcttctgattcagtagatctgggatggggcctaaatatttgcatttttaagtgtataagtgatgctgatgctgctggttccaggaccacattttaagaaatatcgataaaggtggagaattaaactgcagctcagaagacctgagttcttgccccagcttgacttttacaatctagcaaatggataaaactcgcaggacttcagttctcttcatctacacagtgagtggttagattggctttgtaatttaaaattaaacagggtttgattctgattcactacacaaggttccaaagaaggaatgatatctcctttcatttcttcactttgtcttctgtccctaggtaatcttatctatgttcctgatttaacctaactaatgtttctgcaaagcttctaatatttacatctccagccctgaaactctcatttgaatgctagtcttatatacatacccccctgcctaattgacatctccacttaaatgtatcagaggcaactcagactcaacaaggaccaaactgaatgttcgaccttgtccttcaaacccgatacacatccaggttcctccatcccagtgaatgacactatccagttaagcaagccaaaagtctggattttttttcctcactcttcctcactgtccgtcaactaccattattaaatctgtcacctggtcctactgatttaaccttctcaatatctctacagtttttctttatgcccattagtatcctagtgcaagctaccatcgtctctcattggaattaacacagtaacccccctacccaccagactgttctgcctacagatagtgtgatatttaataaatataaatctagccttggctagatttctccttcaaaaggttcacattaattttagccttaaaatggtgtgcaaagctttgcatagtctgtcctttgctatgttggcagtattttttactatccctctcatctgctcattctctgtactccaactacactaactttgtttttttttttttttagatttctctaactacagtgctgtaatctctttttcctttgcacgtactattccgtttgtcagggaatctgctcactgtctccacccactccacacactcacgttttcctgcccgtcttaccggtcttgatcggttgtcacttgctcaggaaggtttccctggtcaccccctccacaaattgaattaagtcctcttgctgcatgctgtcctagtgctctttattttcctctcctcatccttaattcagtttgtaattacatgttatttgtgtgaggatttgattattatctgtgtcacccactagatattgggcattctttacttactcaccactgaattcatagaaccacagtaattgtacacaacaaatattcaagagaaatttattgaattgatgaatgaaaagttgtaccttaacatgttcctgacatgtatccaaaaaagagctcccctttggggtctattaggactttggacctaggtaaacgtaaccctagtttcgctcaggtttaaacagtagaaagtaattgggtctcttttgcatgtggctttcctaagggctaaccctgtcttcggaatgagtcaatacagcagagctgttgaaagcagactctagcttcggacaacgttggtccgaatcatggttccgtcatttcttagctgtgtgatttagaataaattaatgttttaaagctttgatttcctcttccttaatctggagatgctaataaagccaacttcgtagaggtattgcgatgagtaaataagcataatttgctgtaaacaccttgcagattgcctgttgtatgctaactaatcaataaattgaagctcttaacatcattatattagatatttccagcattgagtatactatcaggcatgtggtagaagctcaatataaagttttgttaaattgaatagattccatatatggtatttctacagcattatgctccttatttaagtgtctctaagtattttttaagtatcacctcacaaaagacagatgtttaattcattacacatgtgaattgttttagatagaaaataaaataaaaaattcaaacattgaaatcaatagtgtaccttaccttaggattacaccataaaatttctaccaatcgagaataaagtgtacagtctatttcctttctaatacttttaacgcaacaaatgtttattgaacacttactacttctaatctatgacagacataaagatgaataaagcatgccacaatgtttaaaggagctcactatatcataagaaagcggattcacacagacaactctataagataaagtggtaaatttaggctggcctgtgaaacaaaggattataggtatagttaagaggtggaatttattttacttcgaggatttcagttacctttatattctttgtctaacctttcatgtttctctttcttcagaaacagagcacctttttcctgacacattcatttccccctatggagtagagcagttgttttcaaagtgtgggtcccagatcagcatcacggggatggttagaaatgcccattcttgagcctcacaacagacctactgaaacagaaattcttggagagtggagcccgcagatctgtgatcaagccctgtaggcaattctaacgcacactcaagttaaagaaccacgggaagaaaggtccatcctgtaacaagacagatttttttcattagcatcaa

SEQ ID NO: 69 - protein, 2160 aa, Homo sapiens
MLWWEEVEDCYEREDVQKKTFTKWVNAQFSKFGKQHIENLFSDLQDGRRLLDLLEGLTGQKLPKEKGSTRVHALNNVNKALRVLQNNNVDLVNIGSTDIVDGNHKLTLGLIWNIILHWQVKNVMKNIMAGLQQTNSEKILLSWVRQSTRNYPQVNVINFTTSWSDGLALNALIHSHRPDLFDWNSVVCQQSATQRLEHAFNIARYQLGIEKLLDPEDVDTTYPDKKSILMYITSLFQVLPQQVSIEAIQEVEMLPRPPKVTKEEHFQLHHQMHYSQQITVSLAQGYERTSSPKPRFKSYAYTQAAYVTTSDPTRSPFPSQHLEAPEDKSFGSSLMESEVNLDRYQTALEEVLSWLLSAEDTLQAQGEISNDVEVVKDQFHTHEGYMMDLTAHQGRVGNILQLGSKLIGTGKLSEDEETEVQEQMNLLNSRWECLRVASMEKQSNLHRVLMDLQNQKLKELNDWLTKTEERTRKMEEEPLGPDLEDLKRQVQQHKVLQEDLEQEQVRVNSLTHMVVVVDESSGDHATAALEEQLKVLGDRWANICRWTEDRWVLLQDILLKWQRLTEEQCLFSAWLSEKEDAVNKIHTTGFKDQNEMLSSLQKLAVLKADLEKKKQSMGKLYSLKQDLLSTLKNKSVTQKTEAWLDNFARCWDNLVQKLEKSTAQISQAVTTTQPSLTQTTVMETVTTVTTREQILVKHAQEELPPPPPQKKRQITVDSEIRKRLDVDITELHSWITRSEAVLQSPEFAIFRKEGNFSDLKEKVNAIEREKAEKFRKLQDASRSAQALVEQMVNEGVNADSIKQASEQLNSRWIEFCQLLSERLNWLEYQNNIIAFYNQLQQLEQMTTTAENWLKIQPTTPSEPTAIKSQLKICKDEVNRLSDLQPQIERLKIQSIALKEKGQGPMFLDADFVAFTNHFKQVFSDVQAREKELQTIFDTLPPMRYQETMSAIRTWVQQSETKLSIPQLSVTDYEIMEQRLGELQALQSSLQEQQSGLYYLSTTVKEMSKKAPSEISRKYQSEFEEIEGRWKKLSSQLVEHCQKLEEQMNKLRKIQNHIQTLKKWMAEVDVFLKEEWPALGDSEILKKQLKQCRLLVSDIQTIQPSLNSVNEGGQKIKNEAEPEFASRLETELKELNTQWDHMCQQVYARKEALKGGLEKTVSLQKDLSEMHEWMTQAEEEYLERDFEYKTPDELQKAVEEMKRAKEEAQQKEAKVKLLTESVNSVIAQAPPVAQEALKKELETLTTNYQWLCTRLNGKCKTLEEVWACWHELLSYLEKANKWLNEVEFKLKTTENIPGGAEEISEVLDSLENLMRHSEDNPNQIRILAQTLTDGGVMDELINEELETFNSRWRELHEEAVRRQKLLEQSIQSAQETEKSLHLIQESLTFIDKQLAAYIADKVDAAQMPQEAQKIQSDLTSHEISLEEMKKHNQGKEAAQRVLSQIDVAQKKLQDVSMKFRLFQKPANFEQRLQESKMILDEVKMHLPALETKSVEQEVVQSQLNHCVNLYKSLSEVKSEVEMVIKTGRQIVQKKQTENPKELDERVTALKLHYNELGAKVTERKQQLEKCLKLSRKMRKEMNVLTEWLAATDMELTKRSAVEGMPSNLDSEVAWGKATQKEIEKQKVHLKSITEVGEALKTVLGKKETLVEDKLSLLNSNWIAVTSRAEEWLNLLLEYQKHMETFDQNVDHITKWIIQADTLLDESEKKKPQQKEDVLKRLKAELNDIRPKVDSTRDQAANLMANRGDHCRKLVEPQISELNHRFAAISHRIKTGKASIPLKELEQFNSDIQKLLEPLEAEIQQGVNLKEEDFNKDMNEDNEGTVKELLQRGDNLQQRITDERKREEIKIKQQLLQTKHNALKDLRSQRRKKALEISHQWYQYKRQADDLLKCLDDIEKKLASLPEPRDERKIKEIDRELQKKKEELNAVRRQAEGLSEDGAAMAVEPTQIQLSKRWREIESKFAQFRRLNFAQIHTVREETMMVMTEDMPLEISYVPSTYLTEITHVSQALLEVEQLLNAPDLCAKDFEDLFKQEESLKNIKDSLQQSSGRIDIIHSKKTAALQSATPVERVKLQEALSQLDFQWEKVNKMYKDRQGRFDRSVEKWRRFHYDIKIFNQWLTEAEQFLRKTQIPENWEHAKYKWYLKRTGDRGLILLDDVI

SEQ ID NO: 70 - DNA, 8969 bp, Homo sapiens
actttccccctacaggactcagatctgggaggcaattaccttcggagaaaaacgaataggaaaaactgaagtgttactttttttaaagctgctgaagtttgttggtttctcattgtttttaagcctactggagcaataaagtttgaagaacttttaccaggttttttttatcgctgccttgatatacacttttcaaaatgctttggtgggaagaagtagaggactgttatgaaagagaagatgttcaaaagaaaacattcacaaaatgggtaaatgcacaattttctaagtttgggaagcagcatattgagaacctcttcagtgacctacaggatgggaggcgcctcctagacctcctcgaaggcctgacagggcaaaaactgccaaaagaaaaaggatccacaagagttcatgccctgaacaatgtcaacaaggcactgcgggttttgcagaacaataatgttgatttagtgaatattggaagtactgacatcgtagatggaaatcataaactgactcttggtttgatttggaatataatcctccactggcaggtcaaaaatgtaatgaaaaatatcatggctggattgcaacaaaccaacagtgaaaagattctcctgagctgggtccgacaatcaactcgtaattatccacaggttaatgtaatcaacttcaccaccagctggtctgatggcctggctttgaatgctctcatccatagtcataggccagacctatttgactggaatagtgtggtttgccagcagtcagccacacaacgactggaacatgcattcaacatcgccagatatcaattaggcatagagaaactactcgatcctgaagatgttgataccacctatccagataagaagtccatcttaatgtacatcacatcactcttccaagttttgcctcaacaagtgagcattgaagccatccaggaagtggaaatgttgccaaggccacctaaagtgactaaagaagaacattttcagttacatcatcaaatgcactattctcaacagatcacggtcagtctagcacagggatatgagagaacttcttcccctaagcctcgattcaagagctatgcctacacacaggctgcttatgtcaccacctctgaccctacacggagcccatttccttcacagcatttggaagctcctgaagacaagtcatttggcagttcattgatggagagtgaagtaaacctggaccgttatcaaacagctttagaagaagtattatcgtggcttctttctgctgaggacacattgcaagcacaaggagagatttctaatgatgtggaagtggtgaaagaccagtttcatactcatgaggggtacatgatggatttgacagcccatcagggccgggttggtaatattctacaattgggaagtaagctgattggaacaggaaaattatcagaagatgaagaaactgaagtacaagagcagatgaatctcctaaattcaagatgggaatgcctcagggtagctagcatggaaaaacaaagcaatttacatagagttttaatggatctccagaatcagaaactgaaagagttgaatgactggctaacaaaaacagaagaaagaacaaggaaaatggaggaagagcctcttggacctgatcttgaagacctaaaacgccaagtacaacaacataaggtgcttcaagaagatctagaacaagaacaagtcagggtcaattctctcactcacatggtggtggtagttgatgaatctagtggagatcacgcaactgctgctttggaagaacaacttaaggtattgggagatcgatgggcaaacatctgtagatggacagaagaccgctgggttcttttacaagacatccttctcaaatggcaacgtcttactgaagaacagtgcctttttagtgcatggctttcagaaaaagaagatgcagtgaacaagattcacacaactggctttaaagatcaaaatgaaatgttatcaagtcttcaaaaactggccgttttaaaagcggatctagaaaagaaaaagcaatccatgggcaaactgtattcactcaaacaagatcttctttcaacactgaagaataagtcagtgacccagaagacggaagcatggctggataactttgcccggtgttgggataatttagtccaaaaacttgaaaagagtacagcacagatttcacaggctgtcaccaccactcagccatcactaacacagacaactgtaatggaaacagtaactacggtgaccacaagggaacagatcctggtaaagcatgctcaagaggaacttccaccaccacctccccaaaagaagaggcagattactgtggattctgaaattaggaaaaggttggatgttgatataactgaacttcacagctggattactcgctcagaagctgtgttgcagagtcctgaatttgcaatctttcggaaggaaggcaacttctcagacttaaaagaaaaagtcaatgccatagagcgagaaaaagctgagaagttcagaaaactgcaagatgccagcagatcagctcaggccctggtggaacagatggtgaatgagggtgttaatgcagatagcatcaaacaagcctcagaacaactgaacagccggtggatcgaattctgccagttgctaagtgagagacttaactggctggagtatcagaacaacatcatcgctttctataatcagctacaacaattggagcagatgacaactactgctgaaaactggttgaaaatccaacccaccaccccatcagagccaacagcaattaaaagtcagttaaaaatttgtaaggatgaagtcaaccggctatcagatcttcaacctcaaattgaacgattaaaaattcaaagcatagccctgaaagagaaaggacaaggacccatgttcctggatgcagactttgtggcctttacaaatcattttaagcaagtcttttctgatgtgcaggccagagagaaagagctacagacaatttttgacactttgccaccaatgcgctatcaggagaccatgagtgccatcaggacatgggtccagcagtcagaaaccaaactctccatacctcaacttagtgtcaccgactatgaaatcatggagcagagactcggggaattgcaggctttacaaagttctctgcaagagcaacaaagtggcctatactatctcagcaccactgtgaaagagatgtcgaagaaagcgccctctgaaattagccggaaatatcaatcagaatttgaagaaattgagggacgctggaagaagctctcctcccagctggttgagcattgtcaaaagctagaggagcaaatgaataaactccgaaaaattcagaatcacatacaaaccctgaagaaatggatggctgaagttgatgtttttctgaaggaggaatggcctgcccttggggattcagaaattctaaaaaagcagctgaaacagtgcagacttttagtcagtgatattcagacaattcagcccagtctaaacagtgtcaatgaaggtgggcagaagataaagaatgaagcagagccagagtttgcttcgagacttgagacagaactcaaagaacttaacactcagtgggatcacatgtgccaacaggtctatgccagaaaggaggccttgaagggaggtttggagaaaactgtaagcctccagaaagatctatcagagatgcacgaatggatgacacaagctgaagaagagtatcttgagagagattttgaatataaaactccagatgaattacagaaagcagttgaagagatgaagagagctaaagaagaggcccaacaaaaagaagcgaaagtgaaactccttactgagtctgtaaatagtgtcatagctcaagctccacctgtagcacaagaggccttaaaaaaggaacttgaaactctaaccaccaactaccagtggctctgcactaggctgaatgggaaatgcaagactttggaagaagtttgggcatgttggcatgagttattgtcatacttggagaaagcaaacaagtggctaaatgaagtagaatttaaacttaaaaccactgaaaacattcctggcggagctgaggaaatctctgaggtgctagattcacttgaaaatttgatgcgacattcagaggataacccaaatcagattcgcatattggcacagaccctaacagatggcggagtcatggatgagctaatcaatgaggaacttgagacatttaattctcgttggagggaactacatgaagaggctgtaaggaggcaaaagttgcttgaacagagcatccagtctgcccaggagactgaaaaatccttacacttaatccaggagtccctcacattcattgacaagcagttggcagcttatattgcagacaaggtggacgcagctcaaatgcctcaggaagcccagaaaatccaatctgatttgacaagtcatgagatcagtttagaagaaatgaagaaacataatcaggggaaggaggctgcccaaagagtcctgtctcagattgatgttgcacagaaaaaattacaagatgtctccatgaagtttcgattattccagaaaccagccaattttgagcagcgtctacaagaaagtaagatgattttagatgaagtgaagatgcacttgcctgcattggaaacaaagagtgtggaacaggaagtagtacagtcacagctaaatcattgtgtgaacttgtataaaagtctgagtgaagtgaagtctgaagtggaaatggtgataaagactggacgtcagattgtacagaaaaagcagacggaaaatcccaaagaacttgatgaaagagtaacagctttgaaattgcattataatgagctgggagcaaaggtaacagaaagaaagcaacagttggagaaatgcttgaaattgtcccgtaagatgcgaaaggaaatgaatgtcttgacagaatggctggcagctacagatatggaattgacaaagagatcagcagttgaaggaatgcctagtaatttggattctgaagttgcctggggaaaggctactcaaaaagagattgagaaacagaaggtgcacctgaagagtatcacagaggtaggagaggccttgaaaacagttttgggcaagaaggagacgttggtggaagataaactcagtcttctgaatagtaactggatagctgtcacctcccgagcagaagagtggttaaatcttttgttggaataccagaaacacatggaaacttttgaccagaatgtggaccacatcacaaagtggatcattcaggctgacacacttttggatgaatcagagaaaaagaaaccccagcaaaaagaagacgtgcttaagcgtttaaaggcagaactgaatgacatacgcccaaaggtggactctacacgtgaccaagcagcaaacttgatggcaaaccgcggtgaccactgcaggaaattagtagagccccaaatctcagagctcaaccatcgatttgcagccatttcacacagaattaagactggaaaggcctccattcctttgaaggaattggagcagtttaactcagatatacaaaaattgcttgaaccactggaggctgaaattcagcagggggtgaatctgaaagaggaagacttcaataaagatatgaatgaagacaatgagggtactgtaaaagaattgttgcaaagaggagacaacttacaacaaagaatcacagatgagagaaagcgagaggaaataaagataaaacagcagctgttacagacaaaacataatgctctcaaggatttgaggtctcaaagaagaaaaaaggctctagaaatttctcatcagtggtatcagtacaagaggcaggctgatgatctcctgaaatgcttggatgacattgaaaaaaaattagccagcctacctgagcccagagatgaaaggaaaataaaggaaattgatcgggaattgcagaagaagaaagaggagctgaatgcagtgcgtaggcaagctgagggcttgtctgaggatggggccgcaatggcagtggagccaactcagatccagctcagcaagcgctggcgggaaattgagagcaaatttgctcagtttcgaagactcaactttgcacaaattcacactgtccgtgaagaaacgatgatggtgatgactgaagacatgcctttggaaatttcttatgtgccttctacttatttgactgaaatcactcatgtctcacaagccctattagaagtggaacaacttctcaatgctcctgacctctgtgctaaggactttgaagatctctttaagcaagaggagtctctgaagaatataaaagatagtctacaacaaagctcaggtcggattgacattattcatagcaagaagacagcagcattgcaaagtgcaacgcctgtggaaagggtgaagctacaggaagctctctcccagcttgatttccaatgggaaaaagttaacaaaatgtacaaggaccgacaagggcgatttgacagatctgttgagaaatggcggcgttttcattatgatataaagatatttaatcagtggctaacagaagctgaacagtttctcagaaagacacaaattcctgagaattgggaacatgctaaatacaaatggtatcttaagatctccgagaggcagaaaaaggggaactgtgcaacccttttgtccttctggatctcaaaatgaagggatacattctgctacatgaaatgtggaattaagaccatgatgcaacatgataaacaacacaaatttgggggtgtctctgtgctatacattattgaatttttccatgctatacactttttggatgtgtctgtgctatttattcagtttttttaaataaaagtttttgtagactaaattgccctctctactttgcatcgtttttgaacaaaggattttcaagactgataagctcaaatgtatcatttattgtattcaagtagcattcaatttttctttagaagtataatttgtagatattttaacacagaaaacttgcaacactgctcatgataggcacttattatatattttttgaaagactatatggataatgattctaactttgacttttcctgttttgccttcactttagaattaagcagagaatcaaatccatattcctgggggcgatgcttggacaacagtatctctttaaagatctttgtgtgagtcgaaggtgcagccagactgggagttattgtgaagaaacagattcaggaaggttgagaaacttgcctaaggctaatcagatagttactggcaatgttgtttctaaatcactgtttggctccctcattcaatgaatctacactatgtgggactgcctcttgctcctgacatcttttgctgctgaaataaatgaactcaaagcctagaaggtagaaaagagggagttcagaattatattcaggcacaaataccaataaggctattgcccccagaactgcaacttctcttggtttaacagataactatttagctgtgaggtacaactgaggaagtggacacacaagttatcaggagattctgatgtgccagtttatatttcttgtcacaggtaatgattcgaaatttcttaaaacagctgtcctcacagtggagtaacctgggagtacatgaaggcattccaaggagtaggcacagatagttttaagggaatttatttctagatcttctactttattttgtactcttcctgaaaactgaattgcctgaaaaaaaaaaaaaaaaaaaaaagacatctgtagtcaagacctcaggctgtttctcctttctaaccacttgccttttctaaccacttctcccaatttaagaaaaaaagccttatatttcatccaactctgatcttactaaggcttcaaacaaaagaagcatgaatgactttcatgacagggcaacatagctttttgcaagaagagtggttgctaactctttgctttcaactgaacccgaagagaagacctgataagttgtcagccgatagatcattaaaaatacgttttggtaagcaatcatcatgtacttttagcatatgccatagcaggagcacaaatgattaagcaatgctactataatacaattccttccgtttctttctactcacctatttgaataagatttttcatcatttacatctatacagacaaaaattagggatagaattgatgctgaagcctttccaattgtagaattaatttatattcttctgaaggtgtataaattgttaaatacccatccatcttattaagagatgtattttcaataaaattttatttttatgtttatcaaattttataatatacatatattgttttggtcaattgcacgttaataattgtaacaatacctcaattgaaaaggtttgttttttacatttaggacttacagtaacagaaaaaaaacactcattgtgtatacatactgtttaagaaaagtatactaggtgatcaataagattttttcaggcataaacatatatcttagttttaagatatcgatatttacaatgtccctcaaattatattattttcagtcatttaagaatgaaaagtacatttcgaatgcggattttaaatctgcaagggttgactcatttttcaagagtctttttaggggatacagaagcaagaatgtttggagttccctgatcagtatctttaagagaaggtatttgttggtagttcctagcaaattccaacagcctgatgctacttaaaagataatagtaattattttaaataatgcttctgataaaaaacattcatgcacactcagtttaaaaagatatttaaacatttgtagttgtagtttgggaactcatgatacaagtacagtctgtaaatgaagctcttagtttgcaaatatcagagataagctattaaaatgcagaaattgaaattgccctgatatatgcataaattagtgtcatctccatcttgtcagttagag

SEQ ID NO: 71 - protein, 2166 aa, Homo sapiens
MLWWEEVEDCYEREDVQKKTFTKWVNAQFSKFGKQHIENLFSDLQDGRRLLDLLEGLTGQKLPKEKGSTRVHALNNVNKALRVLQNNNVDLVNIGSTDIVDGNHKLTLGLIWNIILHWQVKNVMKNIMAGLQQTNSEKILLSWVRQSTRNYPQVNVINFTTSWSDGLALNALIHSHRPDLFDWNSVVCQQSATQRLEHAFNIARYQLGIEKLLDPEDVDTTYPDKKSILMYITSLFQVLPQQVSIEAIQEVEMLPRPPKVTKEEHFQLHHQMHYSQQITVSLAQGYERTSSPKPRFKSYAYTQAAYVTTSDPTRSPFPSQHLEAPEDKSFGSSLMESEVNLDRYQTALEEVLSWLLSAEDTLQAQGEISNDVEVVKDQFHTHEGYMMDLTAHQGRVGNILQLGSKLIGTGKLSEDEETEVQEQMNLLNSRWECLRVASMEKQSNLHRVLMDLQNQKLKELNDWLTKTEERTRKMEEEPLGPDLEDLKRQVQQHKVLQEDLEQEQVRVNSLTHMVVVVDESSGDHATAALEEQLKVLGDRWANICRWTEDRWVLLQDILLKWQRLTEEQCLFSAWLSEKEDAVNKIHTTGFKDQNEMLSSLQKLAVLKADLEKKKQSMGKLYSLKQDLLSTLKNKSVTQKTEAWLDNFARCWDNLVQKLEKSTAQISQAVTTTQPSLTQTTVMETVTTVTTREQILVKHAQEELPPPPPQKKRQITVDSEIRKRLDVDITELHSWITRSEAVLQSPEFAIFRKEGNFSDLKEKVNAIEREKAEKFRKLQDASRSAQALVEQMVNEGVNADSIKQASEQLNSRWIEFCQLLSERLNWLEYQNNIIAFYNQLQQLEQMTTTAENWLKIQPTTPSEPTAIKSQLKICKDEVNRLSDLQPQIERLKIQSIALKEKGQGPMFLDADFVAFTNHFKQVFSDVQAREKELQTIFDTLPPMRYQETMSAIRTWVQQSETKLSIPQLSVTDYEIMEQRLGELQALQSSLQEQQSGLYYLSTTVKEMSKKAPSEISRKYQSEFEEIEGRWKKLSSQLVEHCQKLEEQMNKLRKIQNHIQTLKKWMAEVDVFLKEEWPALGDSEILKKQLKQCRLLVSDIQTIQPSLNSVNEGGQKIKNEAEPEFASRLETELKELNTQWDHMCQQVYARKEALKGGLEKTVSLQKDLSEMHEWMTQAEEEYLERDFEYKTPDELQKAVEEMKRAKEEAQQKEAKVKLLTESVNSVIAQAPPVAQEALKKELETLTTNYQWLCTRLNGKCKTLEEVWACWHELLSYLEKANKWLNEVEFKLKTTENIPGGAEEISEVLDSLENLMRHSEDNPNQIRILAQTLTDGGVMDELINEELETFNSRWRELHEEAVRRQKLLEQSIQSAQETEKSLHLIQESLTFIDKQLAAYIADKVDAAQMPQEAQKIQSDLTSHEISLEEMKKHNQGKEAAQRVLSQIDVAQKKLQDVSMKFRLFQKPANFEQRLQESKMILDEVKMHLPALETKSVEQEVVQSQLNHCVNLYKSLSEVKSEVEMVIKTGRQIVQKKQTENPKELDERVTALKLHYNELGAKVTERKQQLEKCLKLSRKMRKEMNVLTEWLAATDMELTKRSAVEGMPSNLDSEVAWGKATQKEIEKQKVHLKSITEVGEALKTVLGKKETLVEDKLSLLNSNWIAVTSRAEEWLNLLLEYQKHMETFDQNVDHITKWIIQADTLLDESEKKKPQQKEDVLKRLKAELNDIRPKVDSTRDQAANLMANRGDHCRKLVEPQISELNHRFAAISHRIKTGKASIPLKELEQFNSDIQKLLEPLEAEIQQGVNLKEEDFNKDMNEDNEGTVKELLQRGDNLQQRITDERKREEIKIKQQLLQTKHNALKDLRSQRRKKALEISHQWYQYKRQADDLLKCLDDIEKKLASLPEPRDERKIKEIDRELQKKKEELNAVRRQAEGLSEDGAAMAVEPTQIQLSKRWREIESKFAQFRRLNFAQIHTVREETMMVMTEDMPLEISYVPSTYLTEITHVSQALLEVEQLLNAPDLCAKDFEDLFKQEESLKNIKDSLQQSSGRIDIIHSKKTAALQSATPVERVKLQEALSQLDFQWEKVNKMYKDRQGRFDRSVEKWRRFHYDIKIFNQWLTEAEQFLRKTQIPENWEHAKYKWYLKISERQKKGNCATLLSFWISK

SEQ ID NO: 72 - DNA, 6156 bp, Homo sapiens
actttccccctacaggactcagatctgggaggcaattaccttcggagaaaaacgaataggaaaaactgaagtgttactttttttaaagctgctgaagtttgttggtttctcattgtttttaagcctactggagcaataaagtttgaagaacttttaccaggttttttttatcgctgccttgatatacacttttcaaaatgctttggtgggaagaagtagaggactgttatgaaagagaagatgttcaaaagaaaacattcacaaaatgggtaaatgcacaattttctaagtttgggaagcagcatattgagaacctcttcagtgacctacaggatgggaggcgcctcctagacctcctcgaaggcctgacagggcaaaaactgccaaaagaaaaaggatccacaagagttcatgccctgaacaatgtcaacaaggcactgcgggttttgcagaacaataatgttgatttagtgaatattggaagtactgacatcgtagatggaaatcataaactgactcttggtttgatttggaatataatcctccactggcaggtcaaaaatgtaatgaaaaatatcatggctggattgcaacaaaccaacagtgaaaagattctcctgagctgggtccgacaatcaactcgtaattatccacaggttaatgtaatcaacttcaccaccagctggtctgatggcctggctttgaatgctctcatccatagtcataggccagacctatttgactggaatagtgtggtttgccagcagtcagccacacaacgactggaacatgcattcaacatcgccagatatcaattaggcatagagaaactactcgatcctgaagatgttgataccacctatccagataagaagtccatcttaatgtacatcacatcactcttccaagttttgcctcaacaagtgagcattgaagccatccaggaagtggaaatgttgccaaggccacctaaagtgactaaagaagaacattttcagttacatcatcaaatgcactattctcaacagatcacggtcagtctagcacagggatatgagagaacttcttcccctaagcctcgattcaagagctatgcctacacacaggctgcttatgtcaccacctctgaccctacacggagcccatttccttcacagcatttggaagctcctgaagacaagtcatttggcagttcattgatggagagtgaagtaaacctggaccgttatcaaacagctttagaagaagtattatcgtggcttctttctgctgaggacacattgcaagcacaaggagagatttctaatgatgtggaagtggtgaaagaccagtttcatactcatgaggggtacatgatggatttgacagcccatcagggccgggttggtaatattctacaattgggaagtaagctgattggaacaggaaaattatcagaagatgaagaaactgaagtacaagagcagatgaatctcctaaattcaagatgggaatgcctcagggtagctagcatggaaaaacaaagcaatttacatagagttttaatggatctccagaatcagaaactgaaagagttgaatgactggctaacaaaaacagaagaaagaacaaggaaaatggaggaagagcctcttggacctgatcttgaagacctaaaacgccaagtacaacaacataaggtgcttcaagaagatctagaacaagaacaagtcagggtcaattctctcactcacatggtggtggtagttgatgaatctagtggagatcacgcaactgctgctttggaagaacaacttaaggtattgggagatcgatgggcaaacatctgtagatggacagaagaccgctgggttcttttacaagacatccttctcaaatggcaacgtcttactgaagaacagtgcctttttagtgcatggctttcagaaaaagaagatgcagtgaacaagattcacacaactggctttaaagatcaaaatgaaatgttatcaagtcttcaaaaactggccgttttaaaagcggatctagaaaagaaaaagcaatccatgggcaaactgtattcactcaaacaagatcttctttcaacactgaagaataagtcagtgacccagaagacggaagcatggctggataactttgcccggtgttgggataatttagtccaaaaacttgaaaagagtacagcacagatttcacaggctgtcaccaccactcagccatcactaacacagacaactgtaatggaaacagtaactacggtgaccacaagggaacagatcctggtaaagcatgctcaagaggaacttccaccaccacctccccaaaagaagaggcagattactgtggattctgaaattaggaaaaggttggatgttgatataactgaacttcacagctggattactcgctcagaagctgtgttgcagagtcctgaatttgcaatctttcggaaggaaggcaacttctcagacttaaaagaaaaagtcaatgccatagagcgagaaaaagctgagaagttcagaaaactgcaagatgccagcagatcagctcaggccctggtggaacagatggtgaatgagggtgttaatgcagatagcatcaaacaagcctcagaacaactgaacagccggtggatcgaattctgccagttgctaagtgagagacttaactggctggagtatcagaacaacatcatcgctttctataatcagctacaacaattggagcagatgacaactactgctgaaaactggttgaaaatccaacccaccaccccatcagagccaacagcaattaaaagtcagttaaaaatttgtaaggatgaagtcaaccggctatcagatcttcaacctcaaattgaacgattaaaaattcaaagcatagccctgaaagagaaaggacaaggacccatgttcctggatgcagactttgtggcctttacaaatcattttaagcaagtcttttctgatgtgcaggccagagagaaagagctacagacaatttttgacactttgccaccaatgcgctatcaggagaccatgagtgccatcaggacatgggtccagcagtcagaaaccaaactctccatacctcaacttagtgtcaccgactatgaaatcatggagcagagactcggggaattgcaggctttacaaagttctctgcaagagcaacaaagtggcctatactatctcagcaccactgtgaaagagatgtcgaagaaagcgccctctgaaattagccggaaatatcaatcagaatttgaagaaattgagggacgctggaagaagctctcctcccagctggttgagcattgtcaaaagctagaggagcaaatgaataaactccgaaaaattcagaatcacatacaaaccctgaagaaatggatggctgaagttgatgtttttctgaaggaggaatggcctgcccttggggattcagaaattctaaaaaagcagctgaaacagtgcagacttttagtcagtgatattcagacaattcagcccagtctaaacagtgtcaatgaaggtgggcagaagataaagaatgaagcagagccagagtttgcttcgagacttgagacagaactcaaagaacttaacactcagtgggatcacatgtgccaacaggtctatgccagaaaggaggccttgaagggaggtttggagaaaactgtaagcctccagaaagatctatcagagatgcacgaatggatgacacaagctgaagaagagtatcttgagagagattttgaatataaaactccagatgaattacagaaagcagttgaagagatgaagagagctaaagaagaggcccaacaaaaagaagcgaaagtgaaactccttactgagtctgtaaatagtgtcatagctcaagctccacctgtagcacaagaggccttaaaaaaggaacttgaaactctaaccaccaactaccagtggctctgcactaggctgaatgggaaatgcaagactttggaagaagtttgggcatgttggcatgagttattgtcatacttggagaaagcaaacaagtggctaaatgaagtagaatttaaacttaaaaccactgaaaacattcctggcggagctgaggaaatctctgaggtgctagattcacttgaaaatttgatgcgacattcagaggataacccaaatcagattcgcatattggcacagaccctaacagatggcggagtcatggatgagctaatcaatgaggaacttgagacatttaattctcgttggagggaactacatgaagaggctgtaaggaggcaaaagttgcttgaacagagcatccagtctgcccaggagactgaaaaatccttacacttaatccaggagtccctcacattcattgacaagcagttggcagcttatattgcagacaaggtggacgcagctcaaatgcctcaggaagcccagaaaatccaatctgatttgacaagtcatgagatcagtttagaagaaatgaagaaacataatcaggggaaggaggctgcccaaagagtcctgtctcagattgatgttgcacagaaaaaattacaagatgtctccatgaagtttcgattattccagaaaccagccaattttgagcagcgtctacaagaaagtaagatgattttagatgaagtgaagatgcacttgcctgcattggaaacaaagagtgtggaacaggaagtagtacagtcacagctaaatcattgtgtgaacttgtataaaagtctgagtgaagtgaagtctgaagtggaaatggtgataaagactggacgtcagattgtacagaaaaagcagacggaaaatcccaaagaacttgatgaaagagtaacagctttgaaattgcattataatgagctgggagcaaaggtaacagaaagaaagcaacagttggagaaatgcttgaaattgtcccgtaagatgcgaaaggaaatgaatgtcttgacagaatggctggcagctacagatatggaattgacaaagagatcagcagttgaaggaatgcctagtaatttggattctgaagttgcctggggaaaggctactcaaaaagagattgagaaacagaaggtgcacctgaagagtatcacagaggtaggagaggccttgaaaacagttttgggcaagaaggagacgttggtggaagataaactcagtcttctgaatagtaactggatagctgtcacctcccgagcagaagagtggttaaatcttttgttggaataccagaaacacatggaaacttttgaccagaatgtggaccacatcacaaagtggatcattcaggctgacacacttttggatgaatcagagaaaaagaaaccccagcaaaaagaagacgtgcttaagcgtttaaaggcagaactgaatgacatacgcccaaaggtggactctacacgtgaccaagcagcaaacttgatggcaaaccgcggtgaccactgcaggaaattagtagagccccaaatctcagagctcaaccatcgatttgcagccatttcacacagaattaagactggaaaggcctccattcctttgaaggaattggagcagtttaactcagatatacaaaaattgcttgaaccactggaggctgaaattcagcagggggtgaatctgaaagaggaagacttcaataaagatatgaatgaagacaatgagggtactgtaaaagaattgttgcaaagaggagacaacttacaacaaagaatcacagatgagagaaagcgagaggaaataaagataaaacagcagctgttacagacaaaacataatgctctcaaggatttgaggtctcaaagaagaaaaaaggctctagaaatttctcatcagtggtatcagtacaagaggcaggctgatgatctcctgaaatgcttggatgacattgaaaaaaaattagccagcctacctgagcccagagatgaaaggaaaataaagatgaactaatgacttatcggtatatggacgacttcttactcatgttagcccattcatttcatcagagcatcttcacacatcagtgttcactctctatagatttatttgcatattgtctaaatatgtttttttctgttattattttacactttttattttgcttcattctctgttgagttcctcaaacctttaaaaaggaaataaataacttattcactta

SEQ ID NO: 73 - protein, 1915 aa, Homo sapiens
MLWWEEVEDCYEREDVQKKTFTKWVNAQFSKFGKQHIENLFSDLQDGRRLLDLLEGLTGQKLPKEKGSTRVHALNNVNKALRVLQNNNVDLVNIGSTDIVDGNHKLTLGLIWNIILHWQVKNVMKNIMAGLQQTNSEKILLSWVRQSTRNYPQVNVINFTTSWSDGLALNALIHSHRPDLFDWNSVVCQQSATQRLEHAFNIARYQLGIEKLLDPEDVDTTYPDKKSILMYITSLFQVLPQQVSIEAIQEVEMLPRPPKVTKEEHFQLHHQMHYSQQITVSLAQGYERTSSPKPRFKSYAYTQAAYVTTSDPTRSPFPSQHLEAPEDKSFGSSLMESEVNLDRYQTALEEVLSWLLSAEDTLQAQGEISNDVEVVKDQFHTHEGYMMDLTAHQGRVGNILQLGSKLIGTGKLSEDEETEVQEQMNLLNSRWECLRVASMEKQSNLHRVLMDLQNQKLKELNDWLTKTEERTRKMEEEPLGPDLEDLKRQVQQHKVLQEDLEQEQVRVNSLTHMVVVVDESSGDHATAALEEQLKVLGDRWANICRWTEDRWVLLQDILLKWQRLTEEQCLFSAWLSEKEDAVNKIHTTGFKDQNEMLSSLQKLAVLKADLEKKKQSMGKLYSLKQDLLSTLKNKSVTQKTEAWLDNFARCWDNLVQKLEKSTAQISQAVTTTQPSLTQTTVMETVTTVTTREQILVKHAQEELPPPPPQKKRQITVDSEIRKRLDVDITELHSWITRSEAVLQSPEFAIFRKEGNFSDLKEKVNAIEREKAEKFRKLQDASRSAQALVEQMVNEGVNADSIKQASEQLNSRWIEFCQLLSERLNWLEYQNNIIAFYNQLQQLEQMTTTAENWLKIQPTTPSEPTAIKSQLKICKDEVNRLSDLQPQIERLKIQSIALKEKGQGPMFLDADFVAFTNHFKQVFSDVQAREKELQTIFDTLPPMRYQETMSAIRTWVQQSETKLSIPQLSVTDYEIMEQRLGELQALQSSLQEQQSGLYYLSTTVKEMSKKAPSEISRKYQSEFEEIEGRWKKLSSQLVEHCQKLEEQMNKLRKIQNHIQTLKKWMAEVDVFLKEEWPALGDSEILKKQLKQCRLLVSDIQTIQPSLNSVNEGGQKIKNEAEPEFASRLETELKELNTQWDHMCQQVYARKEALKGGLEKTVSLQKDLSEMHEWMTQAEEEYLERDFEYKTPDELQKAVEEMKRAKEEAQQKEAKVKLLTESVNSVIAQAPPVAQEALKKELETLTTNYQWLCTRLNGKCKTLEEVWACWHELLSYLEKANKWLNEVEFKLKTTENIPGGAEEISEVLDSLENLMRHSEDNPNQIRILAQTLTDGGVMDELINEELETFNSRWRELHEEAVRRQKLLEQSIQSAQETEKSLHLIQESLTFIDKQLAAYIADKVDAAQMPQEAQKIQSDLTSHEISLEEMKKHNQGKEAAQRVLSQIDVAQKKLQDVSMKFRLFQKPANFEQRLQESKMILDEVKMHLPALETKSVEQEVVQSQLNHCVNLYKSLSEVKSEVEMVIKTGRQIVQKKQTENPKELDERVTALKLHYNELGAKVTERKQQLEKCLKLSRKMRKEMNVLTEWLAATDMELTKRSAVEGMPSNLDSEVAWGKATQKEIEKQKVHLKSITEVGEALKTVLGKKETLVEDKLSLLNSNWIAVTSRAEEWLNLLLEYQKHMETFDQNVDHITKWIIQADTLLDESEKKKPQQKEDVLKRLKAELNDIRPKVDSTRDQAANLMANRGDHCRKLVEPQISELNHRFAAISHRIKTGKASIPLKELEQFNSDIQKLLEPLEAEIQQGVNLKEEDFNKDMNEDNEGTVKELLQRGDNLQQRITDERKREEIKIKQQLLQTKHNALKDLRSQRRKKALEISHQWYQYKRQADDLLKCLDDIEKKLASLPEPRDERKIKMN

SEQ ID NO: 74 - protein, 2158 aa, Mus musculus
MWWVDCYRDVKKTTKWNASKGKHDNSDDGKRDGTGKKKGSTRVHANNVNKARVKNNVDVNGSTDVDGNHKTGWNHWVKNVMKTMAGTNSKSWVRSTRNYVNVNTSSWSDGANAHSHRDDWNSVVSHSATRHANAKCGKDDVATTYDKKSMYTSVVSAVMRTSSKVTRHHHMHYSTVSAGYTSSSKRKSYATAAYVATSDSTSYSHARDKSDSSMTVNDSYTAVSWSADTRAGSNDVVKHAHGMMDTSHGVGNVGSVGKGKSDAVMNNSRWCRVASMKSKHKVMDNKKDDWTKTRTKKMGDDKCVHKVDVRVNSTHMVVVVDSSGDHATAAKVGDRWANCRWTDRWVDKWHTCSTWSKDAMKNTSGKDNMMSSHKSTKDKKKTMKSSNDSAKNKSVTKMWMNARWDNTKKSSASAVTTTSTTTVMTVTMVTTRMVKHAKKRTVDSRKRDVDTHSWTRSAVSSAVYRKGNSDKVNAARKAKRKDASRSAAVMANGVNASRASNSRWTCSRVNWYTNTYNMTTTANKTSTTSTAKSKCKDVNRSAKSKKGGMDADVATNHNHDGVRAKKTDTMRYTMSSRTWSSKSVYSVTYMRGKASSKNGNYSDTVKMAKKASCKYSGHWKKSSVSCKHMNKRKNHKTKWMAVDVKWAGDAKKKCRVGDTSNSVNGGKKSAASRTRNTWDHCRVYTRKAKAGDKTVSKDSMHWMTAYRDYKTDTAVMKRAKAKTKVKTTVNSVAHASAAKKTTTNYWCTRNGKCKTVWACWHSYKANKWNVKKTMNVAGTVSNMHHSNNRATTDGGVMDNTNSRWRHAVRKKSSAKSHSDKAAYTDKVDAAMAKSDTSHSMKKHNGKDANRVSDVAKKDVSMKRKANRSKMDVKMHATKSVVSSHCVNYKSSVKSVMVKTGRVKKTNKDRVTAKHYNGAKVTRKKCKSRKMRKMNVTWAATDTTKRSAVGMSNDSVAWGKATKKKAHKSVTGSKMVGKKTVDKSNSNWAVTSRVWNYKHMTDNTKWHADDSKKKKDKRKAMNDMRKVDSTRDAAKMANRGDHCRKVVSNRRAASHRKTGKASKNSDKAGVNKDNKDMSDNGTVNRGDNRTDRKRKKTKHNAKDRSRRKKASHWYYKRADDKCDKKASRDRKKDRKKKNAVRRAGSNGAAMAVTSKRWRSNARRNAHTHTMVVTTDMDVSYVSTYTSHASVDHNTCAKDDKSKNKDNSGRDHKKKTAASATSMKVKVAVAMDGKHRMYKRGRDRSVKWRHHYDMKVNWNVKKTNNWHAKYKWYKDGGRAVVRTNATGSSKTDVNKGSSRWHDCKARRKRKNVSRDNVWADNATGDKVKARGKNTGGAVVSARDKKKKTNWKVSRAKGVHKDRDHWSRNYNSAGDKVTVHGKADVRSKGHYKKSTVKRKDRSWAVNHRRTKDRAGSTTGASASTVTVTSVVTKTVSKMSSVAADNRAWTTDWSDRVKSRVMVGDDNMKKATDRRTAANKNKTSNARTTDRRWDVNRRNMKDSTWAKAVGVRGKDSWKGHTVDAKKTTKAKDRRSVDVANDAKRDYSADDTRKVHMTNNTSWGNHKRVSAATHRDKSWTATTANVDASRKKDSRGVRMKWDGTHTDYHNDNGKRSGSDARRDNMNKWSKKSNRSHASSDWKRHSVWKDDSRAGGDAVKNDHRAKRKTKVMSTTVRTGKYRRANVTRRKAVNAWDKNRSADWRKDARAADDKRAVKGSWVGDDSDHKVKARGAKNVNRVNDAHTTGSYNSTDNTRWRVAVDRVRHAHRDGASHSTSVGWRASNKVYYNHTTTCWDHKMTYSADNNVRSAYRTAMKRRKACDSSAACDADHNKNDMDNCTTYDRHNNVNVCVDMCNWNVYDTGRTGRRVSKTGSCKAHDKYRYKVASSTGCDRRGHDSRGVASGGSNSVRSCANNKAADWMRSMVWVHRVAAATAKHAKCNCKCGRYRSKHNYDCSCSGRVAKGHKMHYMVYCTTTSGDVRDAKVKNKRTKRYAKHRMGYVTVGDNMTVTNWVDSAASSSHDDTHSRHYASRAMNSNGSYNDSSNSDDHHYCSNDSSRSASSRGRADNRNAYDRKHHKGSSMMTSSRDAAAKRHKGRARMDHNKSHRRAAKVNGTTVSSSTSRSDSSMRVVGSTSSMGDSDTSTGVMNNSSSRGRNAGKMRDTM

SEQ ID NO: 75 - protein, 1307 aa, Acidaminococcus sp. (strain BV3L6)
MTQFEGFTNLYQVSKTLRFELIPQGKTLKHIQEQGFIEEDKARNDHYKELKPIIDRIYKTYADQCLQLVQLDWENLSAAIDSYRKEKTEETRNALIEEQATYRNAIHDYFIGRTDNLTDAINKRHAEIYKGLFKAELFNGKVLKQLGTVTTTEHENALLRSFDKFTTYFSGFYENRKNVFSAEDISTAIPHRIVQDNFPKFKENCHIFTRLITAVPSLREHFENVKKAIGIFVSTSIEEVFSFPFYNQLLTQTQIDLYNQLLGGISREAGTEKIKGLNEVLNLAIQKNDETAHIIASLPHRFIPLFKQILSDRNTLSFILEEFKSDEEVIQSFCKYKTLLRNENVLETAEALFNELNSIDLTHIFISHKKLETISSALCDHWDTLRNALYERRISELTGKITKSAKEKVQRSLKHEDINLQEIISAAGKELSEAFKQKTSEILSHAHAALDQPLPTTLKKQEEKEILKSQLDSLLGLYHLLDWFAVDESNEVDPEFSARLTGIKLEMEPSLSFYNKARNYATKKPYSVEKFKLNFQMPTLASGWDVNKEKNNGAILFVKNGLYYLGIMPKQKGRYKALSFEPTEKTSEGFDKMYYDYFPDAAKMIPKCSTQLKAVTAHFQTHTTPILLSNNFIEPLEITKEIYDLNNPEKEPKKFQTAYAKKTGDQKGYREALCKWIDFTRDFLSKYTKTTSIDLSSLRPSSQYKDLGEYYAELNPLLYHISFQRIAEKEIMDAVETGKLYLFQIYNKDFAKGHHGKPNLHTLYWTGLFSPENLAKTSIKLNGQAELFYRPKSRMKRMAHRLGEKMLNKKLKDQKTPIPDTLYQELYDYVNHRLSHDLSDEARALLPNVITKEVSHEIIKDRRFTSDKFFFHVPITLNYQAANSPSKFNQRVNAYLKEHPETPIIGIDRGERNLIYITVIDSTGKILEQRSLNTIQQFDYQKKLDNREKERVAARQAWSVVGTIKDLKQGYLSQVIHEIVDLMIHYQAVVVLENLNFGFKSKRTGIAEKAVYQQFEKMLIDKLNCLVLKDYPAEKVGGVLNPYQLTDQFTSFAKMGTQSGFLFYVPAPYTSKIDPLTGFVDPFVWKTIKNHESRKHFLEGFDFLHYDVKTGDFILHFKMNRNLSFQRGLPGFMPAWDIVFEKNETQFDAKGTPFIAGKRIVPVIENHRFTGRYRDLYPANELIALLEEKGIVFRDGSNILPKLLENDDSHAIDTMVALIRSVLQMRNSNAATGEDYINSPVRDLNGVCFDSRFQNPEWPMDADANGAYHIALKGQLLLNHLKESKDLKLQNGISNQDWLAYIQELRN

SEQ ID NO: 76 - protein, 1228 aa, Lachnospiraceae bacterium ND2006
AASKLEKFTNCYSLSKTLRFKAIPVGKTQENIDNKRLLVEDEKRAEDYKGVKKLLDRYYLSFINDVLHSIKLKNLNNYISLFRKKTRTEKENKELENLEINLRKEIAKAFKGAAGYKSLFKKDIIETILPEAADDKDEIALVNSFNGFTTAFTGFFDNRENMFSEEAKSTSIAFRCINENLTRYISNMDIFEKVDAIFDKHEVQEIKEKILNSDYDVEDFFEGEFFNFVLTQEGIDVYNAIIGGFVTESGEKIKGLNEYINLYNAKTKQALPKFKPLYKQVLSDRESLSFYGEGYTSDEEVLEVFRNTLNKNSEIFSSIKKLEKLFKNFDEYSSAGIFVKNGPAISTISKDIFGEWNLIRDKWNAEYDDIHLKKKAVVTEKYEDDRRKSFKKIGSFSLEQLQEYADADLSVVEKLKEIIIQKVDEIYKVYGSSEKLFDADFVLEKSLKKNDAVVAIMKDLLDSVKSFENYIKAFFGEGKETNRDESFYGDFVLAYDILLKVDHIYDAIRNYVTQKPYSKDKFKLYFQNPQFMGGWDKDKETDYRATILRYGSKYYLAIMDKKYAKCLQKIDKDDVNGNYEKINYKLLPGPNKMLPKVFFSKKWMAYYNPSEDIQKIYKNGTFKKGDMFNLNDCHKLIDFFKDSISRYPKWSNAYDFNFSETEKYKDIAGFYREVEEQGYKVSFESASKKEVDKLVEEGKLYMFQIYNKDFSDKSHGTPNLHTMYFKLLFDENNHGQIRLSGGAELFMRRASLKKEELVVHPANSPIANKNPDNPKKTTTLSYDVYKDKRFSEDQYELHIPIAINKCPKNIFKINTEVRVLLKHDDNPYVIGIDRGERNLLYIVVVDGKGNIVEQYSLNEIINNFNGIRIKTDYHSLLDKKEKERFEARQNWTSIENIKELKAGYISQVVHKICELVEKYDAVIALEDLNSGFKNSRVKVEKQVYQKFEKMLIDKLNYMVDKKSNPCATGGALKGYQITNKFESFKSMSTQNGFIFYIPAWLTSKIDPSTGFVNLLKTKYTSIADSKKFISSFDRIMYVPEEDLFEFALDYKNFSRTDADYIKKWKLYSYGNRIRIFAAAKKNNVFAWEEVCLTSAYKELFNKYGINYQQGDIRALLCEQSDKAFYSSFMALMSLMLQMRNSITGRTDVDFLISPVKNSDGIFYDSRNYEAQENAILPKNADANGAYNIARKVLWAIGQFKKAEDEKLDKVKIAISNKEWLEYAQTSVK

SEQ ID NO: 77 - DNA, 450 bp, Artificial Sequence
  CK8 promoter
ctagactagcatgctgcccatgtaaggaggcaaggcctggggacacccgagatgcctggttataattaacccagacatgtggctgcccccccccccccaacacctgctgcctctaaaaataaccctgcatgccatgttcccggcgaagggccagctgtcccccgccagctagactcagcacttagtttaggaaccagtgagcaagtcagcccttggggcagcccatacaaggccatggggctgggcaagctgcacgcctgggtccggggtgggcacggtgcccgggcaacgagctgaaagctcatctgctctcaggggcccctccctggggacagcccctcctggctagtcacaccctgtaggctcctctatataacccaggggcacaggggctgccctcattctaccaccacctccacagcacagacagacactcaggagccagccagc

SEQ ID NO: 78 - DNA, 436 bp, Artificial Sequence
  CK8e promoter
tgcccatgtaaggaggcaaggcctggggacacccgagatgcctggttataattaacccagacatgtggctgcccccccccccccaacacctgctgcctctaaaaataaccctgcatgccatgttcccggcgaagggccagctgtcccccgccagctagactcagcacttagtttaggaaccagtgagcaagtcagcccttggggcagcccatacaaggccatggggctgggcaagctgcacgcctgggtccggggtgggcacggtgcccgggcaacgagctgaaagctcatctgctctcaggggcccctccctggggacagcccctcctggctagtcacaccctgtaggctcctctatataacccaggggcacaggggctgccctcattctaccaccacctccacagcacagacagacactcaggagccagccagc

SEQ ID NO: 79 - protein, 18 aa, Alphapermutotetravirus Thosea asigna virus
EGRGSLLTCGDVEENPGP

SEQ ID NO: 80 - protein, 20 aa, Aphthovirus Equine rhinitis A virus
QCTNYALLKLAGDVESNPGP

SEQ ID NO: 81 - protein, 19 aa, Porcine teschovirus-1
ATNFSLLKQAGDVEENPGP

SEQ ID NO: 82 - protein, 23 aa, Aphthovirus Foot-and-mouth disease virus
PVKQLLNFDLLKLAGDVESNPGP

SEQ ID NO: 83 - DNA, 26 bp, Artificial Sequence
  Exon 1 forward PCR primer
ctttggtgggaagaagtagaggactg

SEQ ID NO: 84 - DNA, 21 bp, Artificial Sequence
  5 prime-UTR forward PCR primer
ctttccccctacaggactcag

SEQ ID NO: 85 - DNA, 26 bp, Artificial Sequence
  Exon 5 forward PCR primer
ttggaagtactgacatcgtagatgga

SEQ ID NO: 86 - DNA, 26 bp, Artificial Sequence
  Exon 10 reverse PCR primer
ctcagcagaaagaagccacgataata

SEQ ID NO: 87 - DNA, 26 bp, Artificial Sequence
  Exon 12 reverse PCR primer
tgttagccagtcattcaactctttca

SEQ ID NO: 88 - DNA, 24 bp, Artificial Sequence
  ACTN2 forward PCR primer
caacttcaacacgctgcagaccaa

SEQ ID NO: 89 - DNA, 24 bp, Artificial Sequence
  ACTN2 reverse PCR primer
aagcgctccagtcttcgaatctca

SEQ ID NO: 90 - DNA, 25 bp, Artificial Sequence
  mDMD_i7_forward PCR primer
gaggtttaaaacattaagcctttcc

SEQ ID NO: 91 - DNA, 25 bp, Artificial Sequence
  mDMD_i7_reverse PCR primer
acattaagatggacttcttgtctgg

SEQ ID NO: 92 - DNA, 25 bp, Artificial Sequence
  mDMD_i9_reverse PCR primer
tactcacatatgggtcgttttcctt

SEQ ID NO: 93 - DNA, 19 bp, Mus musculus
gtcaattcaaatggtgcac

SEQ ID NO: 94 - DNA, 33 bp, Mus musculus
aattaccagtgcaccatttgaattgacatgtta

SEQ ID NO: 95 - DNA, 33 bp, Mus musculus
taacatgtcaattcaaatggtgcactggtaatt

SEQ ID NO: 96 - DNA, 33 bp, Mus musculus
tatctcctcgtgaagagctggtttgtttttcca

SEQ ID NO: 97 - DNA, 33 bp, Mus musculus
tggaaaaacaaaccagctcttcacgaggagata

SEQ ID NO: 98 - DNA, 12 bp, Mus musculus
ccagtggaagag

SEQ ID NO: 99 - DNA, 33 bp, Mus musculus
ctactcgatcctgaagcatttggaagctcctga

SEQ ID NO: 100 - protein, 10 aa, Mus musculus
LLDPEAFGSS

SEQ ID NO: 101 - DNA, 33 bp, Homo sapiens
ttcatccgtcatcttcggcagattaattatgca

SEQ ID NO: 102 - DNA, 33 bp, Homo sapiens
tgcataattaatctgccgaagatgacggatgaa

SEQ ID NO: 103 - DNA, 12 bp, Homo sapiens
ccgtcaggatgg

SEQ ID NO: 104 - DNA, 33 bp, Homo sapiens
gtatgccctatggatggagcatactgcatttgg

SEQ ID NO: 105 - DNA, 33 bp, Homo sapiens
ccaaatgcagtatgctccatccatagggcatac

SEQ ID NO: 106 - DNA, 12 bp, Homo sapiens
tctaagcatttg

SEQ ID NO: 107 - protein, 4 aa, Homo sapiens
SKHL

SEQ ID NO: 108 - DNA, 33 bp, Homo sapiens
gtattcctcctatccaaaaagcgcttttatatc

SEQ ID NO: 109 - DNA, 33 bp, Homo sapiens
gatataaaagcgctttttggataggaggaatac

SEQ ID NO: 110 - DNA, 33 bp, Homo sapiens; identical to SEQ ID NO: 104

SEQ ID NO: 111 - DNA, 33 bp, Homo sapiens; identical to SEQ ID NO: 105

SEQ ID NO: 112 - DNA, 12 bp, Homo sapiens
cctcctggatgg

SEQ ID NO: 113 - DNA, 12 bp, Homo sapiens
tggcagcatttg

SEQ ID NO: 114 - protein, 4 aa, Homo sapiens
WQHL

SEQ ID NO: 115 - DNA, 20 bp, Homo sapiens
ctcaacaatttgggagacgg

SEQ ID NO: 116 - DNA, 33 bp, Homo sapiens
gcccacctccgtctcccaaattgttgagattac

SEQ ID NO: 117 - DNA, 33 bp, Homo sapiens
gtaatctcaacaatttgggagacggaggtgggc

SEQ ID NO: 118 - DNA, 33 bp, Homo sapiens
tattaaagagttactcatctatatatggaaatc

SEQ ID NO: 119 - DNA, 33 bp, Homo sapiens
gatttccatatatagatgagtaactctttaata

SEQ ID NO: 120 - DNA, 20 bp, Homo sapiens
aagagttactcatctatata

SEQ ID NO: 121 - DNA, 12 bp, Homo sapiens
gagactaagaaa

SEQ ID NO: 122 - DNA, 15 bp, Homo sapiens
agtcatagtttacat

SEQ ID NO: 123 - protein, 5 aa, Homo sapiens
SHSLH

SEQ ID NO: 124 - DNA, 19 bp, Homo sapiens
gtcaattcaaatggtgcac

SEQ ID NO: 125 - DNA, 33 bp, Homo sapiens; identical to SEQ ID NO: 94

SEQ ID NO: 126 - DNA, 33 bp, Homo sapiens; identical to SEQ ID NO: 95

SEQ ID NO: 127 - DNA, 12 bp, Homo sapiens
taccaggtttgt

SEQ ID NO: 128 - DNA, 33 bp, Homo sapiens; identical to SEQ ID NO: 96

SEQ ID NO: 129 - DNA, 33 bp, Homo sapiens; identical to SEQ ID NO: 97

SEQ ID NO: 130 - DNA, 51 bp, Homo sapiens
caattttctaagatgttgataccacctatccagataagaagtccatcttaa

SEQ ID NO: 131 - protein, 16 aa, Homo sapiens
QFSKMLIPPIQIRSPS

SEQ ID NO: 132 - DNA, 24 bp, Homo sapiens
caattttctaagcatttggaagct

SEQ ID NO: 133 - protein, 8 aa, Homo sapiens
QFSKHLEA

1. A composition comprising:
a sequence encoding a first DMD guide RNA (gRNA) targeting a first genomic target sequence;
a sequence encoding a second DMD gRNA targeting a second genomic target sequence;
a sequence encoding a first promoter, wherein the first promoter drives expression of the sequence encoding the first DMD gRNA; and
a sequence encoding a second promoter, wherein the second promoter drives expression of the sequence encoding the second DMD gRNA;
wherein the first genomic target sequence is in any one of introns 2-9 of the dystrophin gene;
wherein the second genomic target sequence is in any one of introns 2-9 of the dystrophin gene.

2. The composition of claim 1, wherein the first genomic target sequence is in intron 2 and the second genomic target sequence is in intron 7 of the dystrophin gene.

3. The composition of claim 1, wherein the first genomic target sequence is in intron 5 and the second genomic target sequence is in intron 7 of the dystrophin gene.

4. The composition of claim 1, wherein the first genomic target sequence is in intron 2 and the second genomic target sequence is in intron 9 of the dystrophin gene.

5. The composition of claim 1, wherein the first genomic target sequence is in intron 7 and the second genomic target sequence is in intron 9 of the dystrophin gene.

6. The composition of claim 1, wherein the first genomic target sequence is located 5′ from a wildtype exon, and the second genomic target sequence is located 3′ from the wildtype exon.

7. The composition of claim 6, wherein the wildtype exon is exon 2, 3, 4, 5, 6, 7, 8 or 9 of dystrophin.

8. The composition of claim 1, wherein the first genomic target sequence is located 5′ from an exon comprising a mutation, and the second genomic target sequence is located 3′ from the exon comprising a mutation.

9. The composition of claim 8, wherein the exon comprising a mutation is exon 2, 3, 4, 5, 6, 7, 8 or 9 of dystrophin.

10. The composition of claim 1, wherein the sequence encoding the first DMD gRNA and the sequence encoding the second DMD gRNA are identical.

11. The composition of claim 1, wherein the sequence encoding the first DMD gRNA and the sequence encoding the second DMD gRNA are not identical.

12. The composition of claim 1, wherein the sequence encoding the first DMD guide RNA is any one of SEQ ID NO: 1 to 5.

13. The composition of claim 1, wherein the sequence encoding the second DMD guide RNA is any one of SEQ ID NO: 1 to 5.

14. The composition of claim 1, wherein the sequence of the first DMD guide RNA is any one of SEQ ID NO: 6 to 10.

15. The composition of claim 1, wherein the sequence of the second DMD guide RNA is any one of SEQ ID NO: 6 to 10.

16. The composition of claim 1, wherein the sequence encoding the first promoter and the sequence encoding the second promoter are identical.

17. The composition of claim 1, wherein the sequence encoding the first promoter and the sequence encoding the second promoter are not identical.

18. The composition of claim 1, wherein at least one of the first promoter and the second promoter is a constitutive promoter.

19. The composition of claim 1, wherein at least one of the first promoter and the second promoter is an inducible promoter.

20. The composition of claim 1, wherein at least one of the first promoter and the second promoter is a muscle-specific promoter.

21. The composition of claim 20, wherein at least one of the first promoter and the second promoter is CK8.

22. The composition of claim 20, wherein at least one of the first promoter and the second promoter is CK8e.

23. The composition of claim 1, wherein at least one of the first promoter and the second promoter is selected from the group consisting of the U6 promoter, the H1 promoter, and the 7SK promoter.

24. The composition of claim 1, wherein a first vector comprises the sequence encoding the first DMD gRNA and the first promoter, and a second vector comprises the sequence encoding the second DMD gRNA and the second promoter.

25. The composition of claim 24, wherein the at least one of the first vector and the second vector is a non-viral vector.

26. The composition of claim 25, wherein the non-viral vector is a plasmid.

27. The composition of claim 25, wherein a liposome or nanoparticle comprises the non-viral vector.

28. The composition of claim 24, wherein at least one of the first vector and the second vector is a viral vector.

29. The composition of claim 28, wherein the viral vector is an adeno-associated viral (AAV) vector.

30. The composition of claim 29, wherein the AAV vector is replication-defective or conditionally replication defective.

31. The composition of claim 29, wherein the AAV vector is a recombinant AAV vector.

32. The composition of claim 29, wherein the AAV vector comprises a sequence isolated or derived from an AAV vector of serotype AAV1, AAV2, AAV3, AAV4, AAV5, AAV6, AAV7, AAV8, AAV9, AAV10, AAV11, AAVRh.74 or any combination thereof.

33. The composition of claim 1, wherein a first vector comprises the sequence encoding the first DMD gRNA, the sequence encoding the second DMD gRNA, the sequence encoding the first promoter, and the sequence encoding the second promoter.

34. The composition of claim 33, wherein the vector is a non-viral vector.

35. The composition of claim 34, wherein the non-viral vector is a plasmid.

36. The composition of claim 33, wherein the vector is a viral vector.

37. The composition of claim 36, wherein the viral vector is an adeno-associated viral (AAV) vector.

38. The composition of claim 37, wherein the AAV vector is replication-defective or conditionally replication defective.

39. The composition of claim 37, wherein the AAV vector is a recombinant AAV vector.

40. The composition of claim 37, wherein the AAV vector comprises a sequence isolated or derived from an AAV vector of serotype AAV1, AAV2, AAV3, AAV4, AAV5, AAV6, AAV7, AAV8, AAV9, AAV10, AAV11, AAVRh.74 or any combination thereof.

41. The composition of claim 1, wherein the composition further comprises a sequence encoding a nuclease.

42. The composition of claim 41, wherein the nuclease is Cas9.

43. The composition of claim 42, wherein the sequence encoding the Cas9 is isolated or derived from S. aureus.

44. The composition of claim 1, further comprising a pharmaceutically-acceptable carrier.

45. A cell comprising the composition of claim 1.

46. The cell of claim 45, wherein the cell is a mammalian cell.

47. The cell of claim 46, wherein the cell is a murine cell.

48. The cell of claim 46, wherein the cell is a human cell.

49. The cell of claim 45, wherein the cell is an oocyte.

50. A composition comprising the cell of claim 45.

51. A genetically engineered mouse comprising the cell of claim 45.

52. A method of treating a subject in need thereof, the method comprising administering to the subject a therapeutically effective amount of the composition of claim 1.

53. The method of claim 52, wherein the composition is administered locally.

54. The method of claim 52, wherein the composition is administered directly to a muscle tissue.

55. The method of claim 54, wherein the composition is administered by an intramuscular infusion or injection.

56. The method of claim 54, wherein the muscle tissue comprises a tibialis anterior tissue, a quadriceps tissue, a soleus tissue, a diaphragm tissue, or a heart tissue.

57. The method of claim 54, wherein the composition is administered by intra-cardiac injection.

58. The method of claim 52, wherein the composition is administered systemically.

59. The method of claim 58, wherein the composition is administered by an intravenous infusion or injection.

60. The method of claim 52, wherein the subject is a neonate, an infant, a child, a young adult, or an adult.

61. The method of claim 52, wherein the subject has muscular dystrophy.

62. The method of claim 52, wherein the subject is a genetic carrier for muscular dystrophy.

63. The method of claim 52, wherein the subject is male.

64. The method of claim 52, wherein the subject is female.

65. The method of claim 52, wherein the subject is less than 10 years old.

66. The method of claim 65, wherein the subject is less than 5 years old.

67. The method of claim 66, wherein the subject is less than 2 years old.

68. The use of the composition of claim 1 in the manufacture of a medicament for the treatment of muscular dystrophy.

69. The composition of claim 1 for use as a medicament in a method of treating muscular dystrophy.

70. A genetically engineered mouse whose genome comprises a deletion of exon 8 and 9 of the dystrophin gene resulting in an out of frame shift and a premature stop codon in exon 10.

71. A genetically engineered mouse produced by a method comprising the steps of:
(a) contacting a fertilized oocyte with (i) a Cas9, a first gRNA, and a second gRNA, or (ii) one or more sequences encoding the same, thereby creating a modified oocyte,
wherein the first gRNA targets an intron located 5′ to exon 8 of the dystrophin gene, wherein the second gRNA targets an intron located 3′ to exon 9 of the dystrophin gene,
wherein the contacting causes exons 8 and 9 to be deleted in the modified oocyte, wherein deletion of exons 8 and 9 results in an out of frame shift and a premature stop codon in exon 10;
(b) transferring the modified oocyte into a recipient female.

72. A mouse produced by the method of claim 71.

73. A method of editing an Actin Binding Domain 1 (ABD-1) dystrophin gene defect in a subject comprising contacting a cell with one or more expression constructs expressing Cas9, a first guide RNA and a second guide RNA, wherein the first guide RNA targets a dystrophin intron 5′ to the gene defect, and the second guide RNA targets a dystrophin intron 3′ to the gene defect, thereby resulting in an edited dystrophin gene lacking dystrophin exons 3-9.

74. The method of claim 73, wherein the cell is a muscle cell, a satellite cell, or an iPSC/iPSC-derived CM.

75. The method of claim 73, wherein the Cas9 expression construct is distinct from the expression construct that expresses the first and/or second guide RNAs.

76. The method of claim 73, wherein the Cas9 expression construct is the same expression construct as that expressing the first and/or second guide RNAs.

77. The method of claim 73, wherein the expression construct(s) is/are a viral vector.

78. The method of claim 73, wherein the expression construct(s) is/are a non-viral vector.

79. The method of claim 73, wherein the expression construct(s) is/are naked plasmid DNA or chemically-modified mRNA.

80. The method of claim 73, wherein (a) the first guide RNA targets dystrophin intron 2 and the second guide RNA targets dystrophin intron 9; (b) the first guide RNA targets dystrophin intron 2, and the second guide RNA targets dystrophin intron 7; (c) the first guide RNA targets dystrophin intron 7, and the second guide RNA targets dystrophin intron 9.

81. The method of claim 73, wherein the expression construct(s) is/are provided to the cell in one or more nanoparticles.

82. The method of claim 77, wherein the viral vector is an AAV vector, such as AAV-9.

83. The method of claim 79, wherein contacting comprises administration of AAV vector to the subject, such as by intra-muscular, intra-peritoneal (IP), retro-orbital (RO), or intra-cardiac injection.

84. The method of claim 73, wherein the expression construct(s) is/are delivered to and iPSC/iPSC-derived CM or directly to a muscle tissue.

85. The method of claim 84, wherein the muscle tissue is tibialis anterior, quadriceps, soleus, diaphragm or heart.

86. The method of claim 73, wherein the expression construct(s) is/are delivered systemically.

87. The method of claim 73, wherein the subject exhibits normal dystrophin-positive myofibers and/or mosaic dystrophin-positive myofibers containing centralized nuclei.

88. The method of claim 73, wherein the subject exhibits a decreased serum CK level as compared to a serum CK level prior to contacting.

89. The method of claim 73, wherein the subject exhibits improved grip strength as compared to a serum CK level prior to contacting.

90. The method of claim 73, wherein the first guide RNA is encoded by the DNA sequence 5′-AATTAATCTGCCGAAGATGA-3′ (SEQ ID NO: 1).

91. The method of claim 90, wherein the second guide RNA is encoded by the DNA sequence 5′-AAACAAACCAGCTCTTCACG-3′ (SEQ ID NO: 5).

92. The method of claim 90, wherein the expression construct(s) is/are delivered to a human iPS cell by nucleofection.

93. The method claim 73, further comprising identifying an ABD-1 target based on reference to a Duchenne mutation database.

94. The method of claim 73, wherein the first and second guide RNAs are encoded by and expressed from the same expression construct.

95. The method of claim 73, wherein the first and second guide RNAs are encoded by and expressed from distinct expression constructs.

96. The method of claim 73, wherein one or more promoters in the expression construct(s) is/are RNA polymerase III promoters.

97. The method of claim 73, wherein the mutant dystrophin exon is exon 3, 4, 5, 6, 7, 8 or 9.
